(19) United States
(12) Patent Application Publication
(10) Pub. No.: US 2025/0170228 A1
(43) Pub. Date: May 29, 2025

(54) TERMINALLY MODIFIED RNA

(71) Applicant: ModernaTX, Inc., Cambridge, MA (US)

(72) Inventors: Tirtha CHAKRABORTY, Medford, MA (US); Stephane BANCEL, Cambridge, MA (US); Stephen G. HOGE, Brookline, MA (US); Atanu ROY, Stoneham, MA (US); Antonin DE FOUGEROLLES, Waterloo (BE); Noubar B. AFEYAN, Cambridge, MA (US)

(21) Appl. No.: 18/672,502

(22) Filed: May 23, 2024

Related U.S. Application Data
(63) Continuation of application No. 17/127,435, filed on Dec. 18, 2020, now Pat. No. 12,023,371.
Application No. 17/127,435 is a continuation of application No. 16/152,945, filed on Oct. 5, 2018, now Pat. No. 10,925,935.
Application No. 16/152,945 is a continuation of application No. 15/429,532, filed on Feb. 10, 2017, now Pat. No. 10,155,029.
Application No. 15/429,532 is a division of application No. 14/043,927, filed on Oct. 2, 2013, now Pat. No. 9,597,380.
(60) Provisional application No. 61/839,903, filed on Jun. 27, 2013.
(60) Provisional application No. 61/737,224, filed on Dec. 14, 2012.
(60) Provisional application No. 61/758,921, filed on Jan. 31, 2013.
(60) Provisional application No. 61/842,709, filed on Jul. 3, 2013.
(60) Provisional application No. 61/775,509, filed on Mar. 9, 2013.
(60) Provisional application No. 61/829,372, filed on May 31, 2013.
(60) Provisional application No. 61/781,139, filed on Mar. 14, 2013.
(60) Provisional application No. 61/857,436, filed on Jul. 23, 2013.
(60) Provisional application No. 61/829,359, filed on May 31, 2013.
(60) Provisional application No. 61/729,933, filed on Nov. 26, 2012.

(51) Int. Cl. A61K 39/00; C12N 15/67

(52) U.S. Cl. CPC A61K 39/00; C12N 15/67

(57) ABSTRACT

The invention relates to compositions and methods for the manufacture and optimization of modified mRNA molecules via optimization of their terminal architecture.

### CROSS REFERENCE TO RELATED APPLICATIONS

[0001] This application is a continuation of U.S. patent application Ser. No. 17/127,435, filed on Dec. 18, 2020, which is now U.S. Pat. No. 12,023,371, issued on Jul. 2, 2024, which application is a divisional of U.S. patent application Ser. No. 16/152,945, filed on Oct. 5, 2018, which is now U.S. Pat. No. 10,925,935, issued on Feb. 23, 2021, which application is a continuation of U.S. patent application Ser. No. 15/429,532, filed on Feb. 10, 2017, which is now U.S. Pat. No. 10,155,029, issued on Dec. 18, 2018, which application is a divisional of U.S. patent application Ser. No. 14/043,927, filed on Oct. 2, 2013, which is now U.S. Pat. No. 9,597,380, issued on Mar. 21, 2017, entitled Terminally Modified RNA, which claims priority to U.S. Provisional Patent Application No. 61/729,933, filed Nov. 26, 2012, entitled Terminally Optimized Modified RNAs, U.S. Provisional Patent Application No. 61/737,224, filed Dec. 14, 2012, entitled Terminally Optimized Modified RNAs, U.S. Provisional Patent Application No. 61/758,921, filed Jan. 31, 2013, entitled Differential Targeting Using RNA Constructs, U.S. Provisional Patent Application No. 61/781,139, filed Mar. 14, 2013, entitled Differential Targeting Using RNA Constructs, U.S. Provisional Patent Application No. 61/829,359, filed May 31, 2013, entitled Differential Targeting Using RNA Constructs, U.S. Provisional Patent Application No. 61/839,903, filed Jun. 27, 2013, entitled Differential Targeting Using RNA Constructs, U.S. Provisional Patent Application No. 61/842,709, filed Jul. 3, 2013, entitled Differential Targeting Using RNA Constructs, U.S. Provisional Patent Application No. 61/857,436, filed Jul. 23, 2013, entitled Differential Targeting Using RNA Constructs, U.S. Provisional Patent Application No. 61/775,509, filed Mar. 9, 2013, entitled Heterologous Untranslated Regions for mRNA and U.S. Provisional Patent Application No. 61/829,372, filed May 31, 2013, entitled Heterologous Untranslated Regions for mRNA; the contents of each of which are herein incorporated by reference in their entireties.

### REFERENCE TO SEQUENCE LISTING

[0002] The instant application contains a Sequence Listing which has been submitted electronically in XML format and is hereby incorporated by reference in its entirety. Said XML copy, created on Apr. 16, 2024, is named 50858-1580012_Sequence_Listing_4-16-24.xml and is 6,201,195 bytes in size.

### FIELD OF THE INVENTION

[0003] The invention relates to compositions and methods for the manufacture and use of modified and/or optimized mRNA and their use in combination with one or more modified or wild type mRNA encoding an RNA binding protein.

### BACKGROUND OF THE INVENTION

[0004] Naturally occurring RNAs are synthesized from four basic ribonucleotides: ATP, CTP, UTP and GTP, but may contain post-transcriptionally modified nucleotides. Further, approximately one hundred different nucleoside modifications have been identified in RNA (Rozenski, J, Crain, P, and McCloskey, J. (1999). The RNA Modification Database: 1999 update. Nucl Acids Res 27: 196-197, herein incorporated by reference in its entirety).

[0005] There are multiple problems with prior methodologies of effecting protein expression. For example, heterologous deoxyribonucleic acid (DNA) introduced into a cell can be inherited by daughter cells (whether or not the heterologous DNA has integrated into the chromosome) or by offspring. Introduced DNA can integrate into host cell genomic DNA at some frequency, resulting in alterations and/or damage to the host cell genomic DNA. In addition, multiple steps must occur before a protein is made. Once inside the cell, DNA must be transported into the nucleus where it is transcribed into RNA. The RNA transcribed from DNA must then enter the cytoplasm where it is translated into protein. This need for multiple processing steps creates lag times before the generation of a protein of interest. Further, it is difficult to obtain DNA expression in cells; frequently DNA enters cells but is not expressed or not expressed at reasonable rates or concentrations. This can be a particular problem when DNA is introduced into cells such as primary cells or modified cell lines. The role of nucleoside modifications on the immuno-stimulatory potential, stability, and on the translation efficiency of RNA, and the consequent benefits to this for enhancing protein expression and producing therapeutics have been previously explored. Such studies are detailed in published co-pending International Publication No WO2012019168 filed August 5, 201, International Publication No WO2012045082 filed Oct. 3, 2011, International Publication No WO2012045075 filed Oct. 3, 2011, International Publication No WO2013052523 filed Oct. 3, 2012, and International Publication No WO2013090648 filed Dec. 14, 2012 the contents of which are incorporated herein by reference in their entirety.

[0006] The use of modified polynucleotides in the fields of antibodies, viruses, veterinary applications and a variety of in vivo settings have been explored and are disclosed in, for example, co-pending and co-owned U.S. Provisional Patent Application No. 61/618,862, filed Apr. 2, 2012, entitled Modified Polynucleotides for the Production of Biologics; U.S. Provisional Patent Application No. 61/681,645, filed Aug. 10, 2012, entitled Modified Polynucleotides for the Production of Biologics; U.S. Provisional Patent Application No. 61/737,130, filed Dec. 14, 2012, entitled Modified Polynucleotides for the Production of Biologics; U.S. Provisional Patent Application No. 61/618,866, filed Apr. 2, 2012, entitled Modified Polynucleotides for the Production of Antibodies; U.S. Provisional Patent Application No. 61/681,647, filed Aug. 10, 2012, entitled Modified Polynucleotides for the Production of Antibodies; U.S. Provisional Patent Application No. 61/737,134, filed Dec. 14, 2012, entitled Modified Polynucleotides for the Production of Antibodies; U.S. Provisional Patent Application No. 61/618,868, filed Apr. 2, 2012, entitled Modified Polynucleotides for the Production of Vaccines; U.S. Provisional Patent Application No. 61/681,648, filed Aug. 10, 2012, entitled Modified Polynucleotides for the Production of Vaccines; U.S. Provisional Patent Application No. 61/737,135, filed Dec. 14, 2012, entitled Modified Polynucleotides for the Production of Vaccines; U.S. Provisional Patent Application No. 61/618,870, filed Apr. 2, 2012, entitled Modified Polynucleotides for the Production of Therapeutic Proteins and Peptides; U.S. Provisional Patent Application No. 61/681,649, filed Aug. 10, 2012, entitled Modified Polynucleotides for the Production of Therapeutic Proteins and Peptides; U.S. Provisional Patent Application No. 61/737,139, filed Dec. 14, 2012, Modified Polynucleotides for the Production of Therapeutic Proteins and Peptides; U.S. Provisional Patent Application No. 61/618,873, filed Apr. 2, 2012, entitled Modified Polynucleotides for the Production of Secreted Proteins; U.S. Provisional Patent Application No. 61/681,650, filed Aug. 10, 2012, entitled Modified Polynucleotides for the Production of Secreted Proteins; U.S. Provisional Patent Application No. 61/737,147, filed Dec. 14, 2012, entitled Modified Polynucleotides for the Production of Secreted Proteins; U.S. Provisional Patent Application No. 61/618,878, filed Apr. 2, 2012, entitled Modified Polynucleotides for the Production of Plasma Membrane Proteins; U.S. Provisional Patent Application No. 61/681,654, filed Aug. 10, 2012, entitled Modified Polynucleotides for the Production of Plasma Membrane Proteins; U.S. Provisional Patent Application No. 61/737,152, filed Dec. 14, 2012, entitled Modified Polynucleotides for the Production of Plasma Membrane Proteins; U.S. Provisional Patent Application No. 61/618,885, filed Apr. 2, 2012, entitled Modified Polynucleotides for the Production of Cytoplasmic and Cytoskeletal Proteins; U.S. Provisional Patent Application No. 61/681,658, filed Aug. 10, 2012, entitled Modified Polynucleotides for the Production of Cytoplasmic and Cytoskeletal Proteins; U.S. Provisional Patent Application No. 61/737,155, filed Dec. 14, 2012, entitled Modified Polynucleotides for the Production of Cytoplasmic and Cytoskeletal Proteins; U.S. Provisional Patent Application No. 61/618,896, filed Apr. 2, 2012, entitled Modified Polynucleotides for the Production of Intracellular Membrane Bound Proteins; U.S. Provisional Patent Application No. 61/668,157, filed Jul. 5, 2012, entitled Modified Polynucleotides for the Production of Intracellular Membrane Bound Proteins; U.S. Provisional Patent Application No. 61/681,661, filed Aug. 10, 2012, entitled Modified Polynucleotides for the Production of Intracellular Membrane Bound Proteins; U.S. Provisional Patent Application No. 61/737,160, filed Dec. 14, 2012, entitled Modified Polynucleotides for the Production of Intracellular Membrane Bound Proteins; U.S. Provisional Patent Application No. 61/618,911, filed Apr. 2, 2012, entitled Modified Polynucleotides for the Production of Nuclear Proteins; U.S. Provisional Patent Application No. 61/681,667, filed Aug. 10, 2012, entitled Modified Polynucleotides for the Production of Nuclear Proteins; U.S. Provisional Patent Application No. 61/737,168, filed Dec. 14, 2012, entitled Modified Polynucleotides for the Production of Nuclear Proteins; U.S. Provisional Patent Application No. 61/618,922, filed Apr. 2, 2012, entitled Modified Polynucleotides for the Production of Proteins; U.S. Provisional Patent Application No. 61/681,675, filed Aug. 10, 2012, entitled Modified Polynucleotides for the Production of Proteins; U.S. Provisional Patent Application No. 61/737,174, filed Dec. 14, 2012, entitled Modified Polynucleotides for the Production of Proteins; U.S. Provisional Patent Application No. 61/618,935, filed Apr. 2, 2012, entitled Modified Polynucleotides for the Production of Proteins Associated with Human Disease; U.S. Provisional Patent Application No. 61/681,687, filed Aug. 10, 2012, entitled Modified Polynucleotides for the Production of Proteins Associated with Human Disease; U.S. Provisional Patent Application No. 61/737,184, filed Dec. 14, 2012, entitled Modified Polynucleotides for the Production of Proteins Associated with Human Disease; U.S. Provisional Patent Application No. 61/618,945, filed Apr. 2, 2012, entitled Modified Polynucleotides for the Production of Proteins Associated with Human Disease; U.S. Provisional Patent Application No. 61/681,696, filed Aug. 10, 2012, entitled Modified Polynucleotides for the Production of Proteins Associated with Human Disease; U.S. Provisional Patent Application No. 61/737,191, filed Dec. 14, 2012, entitled Modified Polynucleotides for the Production of Proteins Associated with Human Disease; U.S. Provisional Patent Application No. 61/618,953, filed Apr. 2, 2012, entitled Modified Polynucleotides for the Production of Proteins Associated with Human Disease; U.S. Provisional Patent Application No. 61/681,704, filed Aug. 10, 2012, entitled Modified Polynucleotides for the Production of Proteins Associated with Human Disease; U.S. Provisional Patent Application No. 61/737,203, filed Dec. 14, 2012, entitled Modified Polynucleotides for the Production of Proteins Associated with Human Disease; U.S. Provisional Patent Application No. 61/681,720, filed Aug. 10, 2012, entitled Modified Polynucleotides for the Production of Cosmetic Proteins and Peptides; U.S. Provisional Patent Application No. 61/737,213, filed Dec. 14, 2012, entitled Modified Polynucleotides for the Production of Cosmetic Proteins and Peptides; U.S. Provisional Patent Application No. 61/681,742, filed Aug. 10, 2012, entitled Modified Polynucleotides for the Production of Oncology-Related Proteins and Peptides; International Application No PCT/US2013/030062, filed Mar. 9, 2013, entitled Modified Polynucleotides for the Production of Biologics and Proteins Associated with Human Disease; U.S. patent application Ser. No. 13/791,922, filed Mar. 9, 2013, entitled Modified Polynucleotides for the Production of Biologics and Proteins Associated with Human Disease; International Application No PCT/US2013/030063, filed Mar. 9, 2013, entitled Modified Polynucleotides; International Application No. PCT/US2013/030064, entitled Modified Polynucleotides for the Production of Secreted Proteins; U.S. patent application Ser. No. 13/791,921, filed Mar. 9, 2013, entitled Modified Polynucleotides for the Production of Secreted Proteins; International Application No PCT/US2013/030059, filed Mar. 9, 2013, entitled Modified Polynucleotides for the Production of Membrane Proteins; International Application No. PCT/US2013/030066, filed Mar. 9, 2013, entitled Modified Polynucleotides for the Production of Cytoplasmic and Cytoskeletal Proteins; International Application No. PCT/US2013/030067, filed Mar. 9, 2013, entitled Modified Polynucleotides for the Production of Nuclear Proteins; International Application No. PCT/US2013/030060, filed Mar. 9, 2013, entitled Modified Polynucleotides for the Production of Proteins; International Application No. PCT/US2013/030061, filed Mar. 9, 2013, entitled Modified Polynucleotides for the Production of Proteins Associated with Human Disease; U.S. patent application Ser. No. 13/791,910, filed Mar. 9, 2013, entitled Modified Polynucleotides for the Production of Proteins Associated with Human Disease; International Application No. PCT/US2013/030068, filed Mar. 9, 2013, entitled Modified Polynucleotides for the Production of Cosmetic Proteins and Peptides; and International Application No. PCT/US2013/030070, filed Mar. 9, 2013, entitled Modified Polynucleotides for the Production of Oncology-Related Proteins and Peptides; International Patent Application No. PCT/US2013/031821, filed Mar. 15, 2013, entitled In Vivo Production of Proteins; the contents of each of which are herein incorporated by reference in their entireties.

[0007] Formulations and delivery of modified polynucleotides are described in, for example, co-pending and co-owned International Publication No WO2013090648, filed Dec. 14, 2012, entitled Modified Nucleoside, Nucleotide, Nucleic Acid Compositions and US Publication No US20130156849, filed Dec. 14, 2012, entitled Modified Nucleoside, Nucleotide, Nucleic Acid Compositions; the contents of each of which are herein incorporated by reference in their entireties.

[0008] There is a need in the art, therefore, for biological modalities to address the modulation of intracellular translation of nucleic acids. The present invention addresses this need by providing methods and compositions for the manufacture and optimization of modified mRNA molecules via alteration of the terminal architecture of the molecules.

### SUMMARY OF THE INVENTION

[0009] Disclosed herein are methods of stabilizing or inducing increased protein expression from a modified mRNA. In another method, a cell is contacted with a modified mRNA encoding a polypeptide of interest in combination with a modified mRNA encoding one or more RNA binding proteins.

[0010] In one embodiment, provided herein are terminally optimized mRNA comprising first region of linked nucleosides encoding a polypeptide of interest which is located 5′ relative to the first region, a second terminal region located 3′ relative to the first terminal region and a 3′tailing region. The first terminal region may comprise at least one translation enhancer element (TEE) such as, but not limited to, the TEEs described in Table 28 such as, but not limited to, TEE-001-TEE-705.

[0011] The first terminal region may comprise a 5′untranslated region (UTR) which may be the native 5′UTR of the encoded polypeptide of interest or may be heterologous to the encoded polypeptide of interest. In one aspect, the 5′UTR may comprise at least one translation initiation sequence such as a kozak sequence, an internal ribosome entry site (IRES) and/or a fragment thereof. As a non-limiting example, the 5′UTR may comprise at least one fragment of an IRES. As another non-limiting example, the 5′UTR may comprise at least 5 fragments of an IRES. In another aspect, the 5′UTR may comprise a structured UTR.

[0012] The second terminal region may comprise at least one microRNA binding site, seed sequence or microRNA binding site without a seed sequence. In one aspect, the microRNA is an immune cell specific microRNA such as, but not limited to, mir-122, miR-142-3p, miR-142-5p, miR-146a and miR-146b.

[0013] In one embodiment, the 3′tailing region may comprise a chain terminating nucleoside such as, but not limited to, 3′-deoxyadenosine (cordycepin), 3′-deoxyuridine, 3′-deoxycytosine, 3′-deoxyguanosine, 3′-deoxythymine, 2′,3′-dideoxynucleosides, 2′,3′-dideoxyadenosine, 2′,3′-dideoxyuridine, 2′,3′-dideoxycytosine, 2′,3′-dideoxyguanosine, 2′,3′-dideoxythymine, a 2′-deoxynucleoside, and —O— methylnucleoside. In one aspect, the 3′ tailing region is a stem loop sequence or a polyA tail.

[0014] In one embodiment, provided herein are terminally optimized mRNA comprising first region of linked nucleosides encoding a polypeptide of interest which is located 5′ relative to the first region, a second terminal region located 3′ relative to the first terminal region and a 3′tailing region of linked nucleosides and at least one chain terminating nucleoside located 3′ relative to the terminally optimized mRNA. In one aspect, the second terminal region may comprise at least one microRNA binding site, seed sequence or microRNA binding site without a seed sequence. In one aspect, the microRNA is an immune cell specific microRNA such as, but not limited to, mir-122, miR-142-3p, miR-142-5p, miR-146a and miR-146b.

[0015] The terminally optimized mRNA described herein may comprise at least one modified nucleoside. In one embodiment, the terminally optimized mRNA comprises a pseudouridine analog such as, but not limited to, 1-carboxymethyl-pseudouridine, 1-propynyl-pseudouridine, 1-taurinomethyl-pseudouridine, 1-taurinomethyl-4-thio-pseudouridine, 1-methyl-pseudouridine (m¹ψ), 1-methyl-4-thio-pseudouridine (m¹s⁴ψ), 4-thio-1-methyl-pseudouridine, 3-methyl-pseudouridine (m³ψ), 2-thio-1-methyl-pseudouridine, 1-methyl-1-deaza-pseudouridine, 2-thio-1-methyl-1-deaza-pseudouridine, dihydropseudouridine, 2-thio-dihydropseudouridine, 2-methoxyuridine, 2-methoxy-4-thio-uridine, 4-methoxy-pseudouridine, 4-methoxy-2-thio-pseudouridine, N1-methyl-pseudouridine, 1-methyl-3-(3-amino-3-carboxypropyl)pseudouridine (acp³ψ), and 2′-O-methyl-pseudouridine (ψm). In another embodiment, the terminally optimized mRNA comprises the pseudouridine analog 1-methylpseudouridine. In yet another embodiment, the terminally optimized mRNA comprises the pseudouridine analog 1-methylpseudouridine and comprises the modified nucleoside 5-methylcytidine.

[0016] The terminally optimized mRNA described herein may comprise at least one 5′ cap structure such as, but not limited to, Cap0, Cap1, ARCA, inosine, N1-methyl-guanosine, 2′fluoro-guanosine, 7-deaza-guanosine, 8-oxo-guanosine, 2-amino-guanosine, LNA-guanosine, 2-azido-guanosine, Cap2, Cap4, and CAP-003-CAP-225.

[0017] In one aspect, at least one region of the terminally optimized mRNA may be codon optimized. As a non-limiting example, the first region of linked nucleosides may be codon optimized.

[0018] Also provided herein are methods of using the terminally optimized mRNA.

[0019] In one embodiment, provided is a method of reducing antigen-mediated immune response in an organism by contacting the organism with a terminally optimized mRNA. The terminally optimized mRNA may comprise a first region of linked nucleosides encoding a polypeptide of interest which is located 5′ relative to the first region, a second terminal region located 3′ relative to the first terminal region and a 3′tailing region. The second terminal region may comprise at least one microRNA binding site, seed sequence or microRNA binding site without a seed sequence. In one aspect, the microRNA is an immune cell specific microRNA such as, but not limited to, mir-122, miR-142-3p, miR-142-5p, miR-146a and miR-146b.

[0020] In a another embodiment, terminally optimized mRNA which reduces the antigen-mediated immune response may comprise at least one translation enhancer element (TEE) sequence such as, but not limited to, TEE-001-TEE 705, a chain terminating nucleoside and/or a stem loop sequence.

[0021] In yet another embodiment, terminally optimized mRNA which reduces the antigen-mediated immune response may comprise at least one region which is codon optimized. As a non-limiting example, the first region of linked nucleosides may be codon optimized.

[0022] The details of various embodiments of the invention are set forth in the description below. Other features, objects, and advantages of the invention will be apparent from the description and the drawings, and from the claims.

### BRIEF DESCRIPTION OF THE DRAWINGS

[0023] FIG. 1 is a schematic of a primary construct of the present invention.

[0024] FIG. 2 is an expanded schematic of the second flanking region of a primary construct of the present invention illustrating the sensor elements of the polynucleotide.

[0025] FIG. 3 is a clone map useful in the present invention.

[0026] FIG. 4 is a histogram showing the improved protein production from modified mRNAs of the present invention having increasingly longer poly-A tails at two concentrations.

### DETAILED DESCRIPTION

[0027] Described herein are compositions and methods for the manufacture and optimization of modified mRNA molecules via alteration of the terminal architecture of the molecules. Specifically disclosed are methods for increasing protein production by altering the terminal regions of the mRNA. Such terminal regions include at least the 5′untranslated region (UTR), and 3′UTR. Other features which may be modified and found to the 5′ or 3′ of the coding region include the 5′cap and poly-A tail of the modified mRNAs (modified RNAs).

[0028] In general, exogenous nucleic acids, particularly viral nucleic acids, introduced into cells induce an innate immune response, resulting in interferon (IFN) production and cell death. However, it is of great interest for therapeutics, diagnostics, reagents and for biological assays to deliver a nucleic acid, e.g., a ribonucleic acid (RNA) inside a cell, either in vivo or ex vivo, such as to cause intracellular translation of the nucleic acid and production of the encoded protein. Of particular importance is the delivery and function of a non-integrative nucleic acid, as nucleic acids characterized by integration into a target cell are generally imprecise in their expression levels, deleteriously transferable to progeny and neighbor cells, and suffer from the substantial risk of mutation.

[0029] The terminal modification described herein may be used in the modified nucleic acids encoding polypeptides of interest, such as, but not limited to, the polypeptides of interest described in, U.S. Provisional Patent Application No. 61/618,862, filed Apr. 2, 2012, entitled Modified Polynucleotides for the Production of Biologics, U.S. Provisional Patent Application No. 61/681,645, filed Aug. 10, 2012, entitled Modified Polynucleotides for the Production of Biologics, U.S. Provisional Patent Application No. 61/737,130, filed Dec. 14, 2012, entitled Modified Polynucleotides for the Production of Biologics, U.S. Provisional Patent Application No. 61/618,866, filed Apr. 2, 2012, entitled Modified Polynucleotides for the Production of Antibodies, U.S. Provisional Patent Application No. 61/681,647, filed Aug. 10, 2012, entitled Modified Polynucleotides for the Production of Antibodies, U.S. Provisional Patent Application No. 61/737,134, filed Dec. 14, 2012, entitled Modified Polynucleotides for the Production of Antibodies, U.S. Provisional Patent Application No. 61/618,868, filed Apr. 2, 2012, entitled Modified Polynucleotides for the Production of Vaccines, U.S. Provisional Patent Application No. 61/681,648, filed Aug. 10, 2012, entitled Modified Polynucleotides for the Production of Vaccines, U.S. Provisional Patent Application No. 61/737,135, filed Dec. 14, 2012, entitled Modified Polynucleotides for the Production of Vaccines, U.S. Provisional Patent Application No. 61/618,870, filed Apr. 2, 2012, entitled Modified Polynucleotides for the Production of Therapeutic Proteins and Peptides, U.S. Provisional Patent Application No. 61/681,649, filed Aug. 10, 2012, entitled Modified Polynucleotides for the Production of Therapeutic Proteins and Peptides, U.S. Provisional Patent Application No. 61/737,139, filed Dec. 14, 2012, Modified Polynucleotides for the Production of Therapeutic Proteins and Peptides, U.S. Provisional Patent Application No. 61/618,873, filed Apr. 2, 2012, entitled Modified Polynucleotides for the Production of Secreted Proteins, U.S. Provisional Patent Application No. 61/681,650, filed Aug. 10, 2012, entitled Modified Polynucleotides for the Production of Secreted Proteins, U.S. Provisional Patent Application No. 61/737,147, filed Dec. 14, 2012, entitled Modified Polynucleotides for the Production of Secreted Proteins, U.S. Provisional Patent Application No. 61/618,878, filed Apr. 2, 2012, entitled Modified Polynucleotides for the Production of Plasma Membrane Proteins, U.S. Provisional Patent Application No. 61/681,654, filed Aug. 10, 2012, entitled Modified Polynucleotides for the Production of Plasma Membrane Proteins, U.S. Provisional Patent Application No. 61/737,152, filed Dec. 14, 2012, entitled Modified Polynucleotides for the Production of Plasma Membrane Proteins, U.S. Provisional Patent Application No. 61/618,885, filed Apr. 2, 2012, entitled Modified Polynucleotides for the Production of Cytoplasmic and Cytoskeletal Proteins, U.S. Provisional Patent Application No. 61/681,658, filed Aug. 10, 2012, entitled Modified Polynucleotides for the Production of Cytoplasmic and Cytoskeletal Proteins, U.S. Provisional Patent Application No. 61/737,155, filed Dec. 14, 2012, entitled Modified Polynucleotides for the Production of Cytoplasmic and Cytoskeletal Proteins, U.S. Provisional Patent Application No. 61/618,896, filed Apr. 2, 2012, entitled Modified Polynucleotides for the Production of Intracellular Membrane Bound Proteins, U.S. Provisional Patent Application No. 61/668,157, filed Jul. 5, 2012, entitled Modified Polynucleotides for the Production of Intracellular Membrane Bound Proteins, U.S. Provisional Patent Application No. 61/681,661, filed Aug. 10, 2012, entitled Modified Polynucleotides for the Production of Intracellular Membrane Bound Proteins, U.S. Provisional Patent Application No. 61/737,160, filed Dec. 14, 2012, entitled Modified Polynucleotides for the Production of Intracellular Membrane Bound Proteins, U.S. Provisional Patent Application No. 61/618,911, filed Apr. 2, 2012, entitled Modified Polynucleotides for the Production of Nuclear Proteins, U.S. Provisional Patent Application No. 61/681,667, filed Aug. 10, 2012, entitled Modified Polynucleotides for the Production of Nuclear Proteins, U.S. Provisional Patent Application No. 61/737,168, filed Dec. 14, 2012, entitled Modified Polynucleotides for the Production of Nuclear Proteins, U.S. Provisional Patent Application No. 61/618,922, filed Apr. 2, 2012, entitled Modified Polynucleotides for the Production of Proteins, U.S. Provisional Patent Application No. 61/681,675, filed Aug. 10, 2012, entitled Modified Polynucleotides for the Production of Proteins, U.S. Provisional Patent Application No. 61/737,174, filed Dec. 14, 2012, entitled Modified Polynucleotides for the Production of Proteins, U.S. Provisional Patent Application No. 61/618,935, filed Apr. 2, 2012, entitled Modified Polynucleotides for the Production of Proteins Associated with Human Disease, U.S. Provisional Patent Application No. 61/681,687, filed Aug. 10, 2012, entitled Modified Polynucleotides for the Production of Proteins Associated with Human Disease, U.S. Provisional Patent Application No. 61/737,184, filed Dec. 14, 2012, entitled Modified Polynucleotides for the Production of Proteins Associated with Human Disease, U.S. Provisional Patent Application No. 61/618,945, filed Apr. 2, 2012, entitled Modified Polynucleotides for the Production of Proteins Associated with Human Disease, U.S. Provisional Patent Application No. 61/681,696, filed Aug. 10, 2012, entitled Modified Polynucleotides for the Production of Proteins Associated with Human Disease, U.S. Provisional Patent Application No. 61/737,191, filed Dec. 14, 2012, entitled Modified Polynucleotides for the Production of Proteins Associated with Human Disease, U.S. Patent Application No. 61/618,953, filed Apr. 2, 2012, entitled Modified Polynucleotides for the Production of Proteins Associated with Human Disease, U.S. Patent Application No. 61/681,704, filed Aug. 10, 2012, entitled Modified Polynucleotides for the Production of Proteins Associated with Human Disease, U.S. Patent Application No. 61/737,203, filed Dec. 14, 2012, entitled Modified Polynucleotides for the Production of Proteins Associated with Human Disease, International Application No PCT/US2013/030062, filed Mar. 9, 2013, entitled Modified Polynucleotides for the Production of Biologics and Proteins Associated with Human Disease; International Application No PCT/US2013/030063, filed Mar. 9, 2013, entitled Modified Polynucloetides; International Application No. PCT/US2013/030064, entitled Modified Polynucleotides for the Production of Secreted Proteins; International Application No PCT/US2013/030059, filed Mar. 9, 2013, entitled Modified Polynucleotides for the Production of Membrane Proteins; International Application No. PCT/US2013/030066, filed Mar. 9, 2013, entitled Modified Polynucleotides for the Production of Cytoplasmic and Cytoskeletal Proteins; International Application No. PCT/US2013/030067, filed Mar. 9, 2013, entitled Modified Polynucleotides for the Production of Nuclear Proteins; International Application No. PCT/US2013/030060, filed Mar. 9, 2013, entitled Modified Polynucleotides for the Production of Proteins; International Application No. PCT/US2013/030061, filed Mar. 9, 2013, entitled Modified Polynucleotides for the Production of Proteins Associated with Human Disease; International Application No. PCT/US2013/030068, filed Mar. 9, 2013, entitled Modified Polynucleotides for the Production of Cosmetic Proteins and Peptides; International Application No. PCT/US2013/030070, filed Mar. 9, 2013, entitled Modified Polynucleotides for the Production of Oncology-Related Proteins and Peptides; and International Application No. PCT/US2013/031821, filed Mar. 15, 2013, entitled In Vivo Production of Proteins, U.S. Provisional Patent Application No. U.S. 61/753,661, filed Jan. 17, 2013, entitled Signal-Sensor Polynucleotide for the Alteration of Cellular Phenotypes and Microenvironments, U.S. Provisional Patent Application No. U.S. 61/754,159, filed Jan. 18, 2013, entitled Signal-Sensor Polynucleotide for the Alteration of Cellular Phenotypes and Microenvironments, U.S. Provisional Patent Application No. U.S. 61/781,097, filed Mar. 14, 2013, entitled Signal-Sensor Polynucleotide for the Alteration of Cellular Phenotypes and Microenvironments, U.S. Provisional Patent Application No. U.S. 61/829,334, filed May 31, 2013, entitled Signal-Sensor Polynucleotide for the Alteration of Cellular Phenotypes and Microenvironments, U.S. Provisional Patent Application No. 61/729,933, filed Nov. 26, 2012, entitled Terminally Optimized Modified RNAs, U.S. Provisional Patent Application No. 61/737,224, filed Dec. 14, 2012, entitled Terminally Optimized Modified RNAs, U.S. Provisional Patent Application No. U.S. 61/758,921, filed Jan. 31, 2013, entitled Differential Targeting Using RNA Constructs, U.S. Provisional Patent Application No. U.S. 61/781,139, filed Mar. 14, 2013, entitled Differential Targeting Using RNA Constructs, U.S. Provisional Application No. 61/829,359, filed May 31, 2013, entitled Differential Targeting Using RNA Constructs, the contents of each of which are herein incorporated by reference in their entireties.

[0030] Provided herein in part are nucleic acid molecules encoding polypeptides capable of modulating a cell's status, function and/or activity, and methods of making and using these nucleic acids and polypeptides. As described herein and in co-pending and co-owned International Publication No WO2012019168 filed Aug. 5, 2011, International Publication No WO2012045082 filed Oct. 3, 2011, International Publication No WO2012045075 filed Oct. 3, 2011, International Publication No WO2013052523 filed Oct. 3, 2012, and International Publication No WO2013090648 filed Dec. 14, 2012, the contents of each of which are incorporated by reference herein in their entirety, these modified nucleic acid molecules are capable of reducing the innate immune activity of a population of cells into which they are introduced, thus increasing the efficiency of protein production in that cell population.

[0031] In addition to utilization of non-natural nucleosides and nucleotides, such as those described in US Patent Publication No US20130115272, filed Oct. 3, 2012 (the contents of which are herein incorporated by reference in its entirety), in the modified RNAs of the present invention, it has now been discovered that concomitant use of altered terminal architecture may also serve to increase protein production from a cell population.

### I. Compositions of the Invention

[0032] This invention provides nucleic acid molecules, including RNAs such as mRNAs, which may be synthetic, that contain one or more modified nucleosides (termed “modified nucleic acids” or “modified nucleic acid molecules”) and polynucleotides, primary constructs and modified mRNA (mmRNA), which have useful properties including the lack of a substantial induction of the innate immune response of a cell into which the mRNA is introduced. Because these modified nucleic acids enhance the efficiency of protein production, intracellular retention of nucleic acids, and viability of contacted cells, as well as possess reduced immunogenicity, these nucleic acids having these properties are termed “enhanced” nucleic acids or modified RNAs herein.

[0033] In one embodiment, the polynucleotides are nucleic acid transcripts which encode one or more polypeptides of interest that, when translated, deliver a signal to the cell which results in the therapeutic benefit to the organism. The signal polynucleotides may optionally further comprise a sequence (translatable or not) which sense the microenvironment of the polynucleotide and alters (a) the function or phenotype outcome associated with the peptide or protein which is translated, (b) the expression level of the signal polynucleotide, and/or both.

[0034] The term “nucleic acid,” in its broadest sense, includes any compound and/or substance that comprise a polymer of nucleotides. These polymers are often referred to as polynucleotides.

[0035] Exemplary nucleic acids include ribonucleic acids (RNAs), deoxyribonucleic acids (DNAs), threose nucleic acids (TNAs), glycol nucleic acids (GNAs), peptide nucleic acids (PNAs), locked nucleic acids (LNAs) or hybrids thereof. They may also include RNAi-inducing agents, RNAi agents, siRNAs, shRNAs, miRNAs, antisense RNAs, ribozymes, catalytic DNA, tRNA, RNAs that induce triple helix formation, aptamers, vectors, etc. In preferred embodiments, the modified nucleic acid molecule is one or more messenger RNAs (mRNAs).

[0036] In preferred embodiments, the polynucleotide or nucleic acid molecule is a messenger RNA (mRNA). As used herein, the term “messenger RNA” (mRNA) refers to any polynucleotide which encodes a polypeptide of interest and which is capable of being translated to produce the encoded polypeptide of interest in vitro, in vivo, in situ or ex vivo. Polynucleotides of the invention may be mRNA or any nucleic acid molecule and may or may not be chemically modified.

[0037] Traditionally, the basic components of an mRNA molecule include at least a coding region, a 5′UTR, a 3′UTR, a 5′ cap and a poly-A tail. Building on this wild type modular structure, the present invention expands the scope of functionality of traditional mRNA molecules by providing polynucleotides or primary RNA constructs which maintain a modular organization, but which comprise one or more structural and/or chemical modifications or alterations which impart useful properties to the polynucleotide including, in some embodiments, the lack of a substantial induction of the innate immune response of a cell into which the polynucleotide is introduced. As such, modified mRNA molecules of the present invention, which may be synthetic, are termed “mmRNA.” As used herein, a “structural” feature or modification is one in which two or more linked nucleotides are inserted, deleted, duplicated, inverted or randomized in a polynucleotide polynucleotide, primary construct or mmRNA without significant chemical modification to the nucleotides themselves. Because chemical bonds will necessarily be broken and reformed to effect a structural modification, structural modifications are of a chemical nature and hence are chemical modifications. However, structural modifications will result in a different sequence of nucleotides. For example, the polynucleotide “ATCG” may be chemically modified to “AT-5meC-G”. The same polynucleotide may be structurally modified from “ATCG” to “ATCCCG”. Here, the dinucleotide “CC” has been inserted, resulting in a structural modification to the polynucleotide.

[0038] Provided are modified nucleic acids containing a translatable region and one, two, or more than two different nucleoside modifications. In some embodiments, the modified nucleic acid exhibits reduced degradation in a cell into which the nucleic acid is introduced, relative to a corresponding unmodified nucleic acid.

[0039] In some embodiments, the chemical modifications can be located on the sugar moiety of the nucleotide

[0040] In some embodiments, the chemical modifications can be located on the phosphate backbone of the nucleotide

[0041] In certain embodiments it is desirable to intracellularly degrade a modified nucleic acid introduced into the cell, for example if precise timing of protein production is desired. Thus, the invention provides a modified nucleic acid containing a degradation domain, which is capable of being acted on in a directed manner within a cell.

Polynucleotide, Primary Construct or mmRNA Architecture

[0042] The polynucleotides of the present invention are distinguished from wild type mRNA in their functional and/or structural design features which serve to, as evidenced herein, overcome existing problems of effective polypeptide production using nucleic acid-based therapeutics.

[0043] FIG. 1 shows a representative primary construct 100 of the present invention. As used herein, the term “primary construct” or “primary mRNA construct” refers to polynucleotide transcript which encodes one or more polypeptides of interest and which retains sufficient structural and/or chemical features to allow the polypeptide of interest encoded therein to be translated. Primary constructs may be polynucleotides of the invention. When structurally or chemically modified, the primary construct may be referred to as a mmRNA.

[0044] Returning to FIG. 1, the primary construct 100 here contains a first region of linked nucleotides 102 that is flanked by a first flanking region 104 and a second flaking region 106. As used herein, the “first region” may be referred to as a “coding region” or “region encoding” or simply the “first region.” This first region may include, but is not limited to, the encoded polypeptide of interest. The polypeptide of interest may comprise at its 5′ terminus one or more signal peptide sequences encoded by a signal peptide sequence region 103. The flanking region 104 may comprise a region of linked nucleotides comprising one or more complete or incomplete 5′ UTRs sequences. The flanking region 104 may also comprise a 5′ terminal cap 108. The second flanking region 106 may comprise a region of linked nucleotides comprising one or more complete or incomplete 3′ UTRs. The flanking region 106 may also comprise a 3′ tailing sequence 110 and a 3′UTR 120.

[0045] Bridging the 5′ terminus of the first region 102 and the first flanking region 104 is a first operational region 105. Traditionally this operational region comprises a start codon. The operational region may alternatively comprise any translation initiation sequence or signal including a start codon.

[0046] Bridging the 3′ terminus of the first region 102 and the second flanking region 106 is a second operational region 107. Traditionally this operational region comprises a stop codon. The operational region may alternatively comprise any translation initiation sequence or signal including a stop codon. According to the present invention, multiple serial stop codons may also be used. In one embodiment, the operation region of the present invention may comprise two stop codons. The first stop codon may be “TGA” and the second stop codon may be selected from the group consisting of “TAA,” “TGA” and “TAG.” The operation region may further comprise three stop codons. The third stop codon may be selected from the group consisting of “TAA,” “TGA” and “TAG.”

[0047] Turning to FIG. 2, the 3′UTR 120 of the second flanking region 106 may comprise one or more sensor sequences 130. These sensor sequences as discussed herein operate as pseudo-receptors (or binding sites) for ligands of the local microenvironment of the primary construct or polynucleotide. For example, microRNA binding sites or miRNA seeds may be used as sensors such that they function as pseudoreceptors for any microRNAs present in the environment of the polynucleotide.

[0048] Generally, the shortest length of the first region of the primary construct of the present invention can be the length of a nucleic acid sequence that is sufficient to encode for a dipeptide, a tripeptide, a tetrapeptide, a pentapeptide, a hexapeptide, a heptapeptide, an octapeptide, a nonapeptide, or a decapeptide. In another embodiment, the length may be sufficient to encode a peptide of 2-30 amino acids, e.g. 5-30, 10-30, 2-25, 5-25, 10-25, or 10-20 amino acids. The length may be sufficient to encode for a peptide of at least 11, 12, 13, 14, 15, 17, 20, 25 or 30 amino acids, or a peptide that is no longer than 40 amino acids, e.g. no longer than 35, 30, 25, 20, 17, 15, 14, 13, 12, 11 or 10 amino acids. Examples of dipeptides that the polynucleotide sequences can encode or include, but are not limited to, carnosine and anserine.

[0049] Generally, the length of the first region encoding the polypeptide of interest of the present invention is greater than about 30 nucleotides in length (e.g., at least or greater than about 35, 40, 45, 50, 55, 60, 70, 80, 90, 100, 120, 140, 160, 180, 200, 250, 300, 350, 400, 450, 500, 600, 700, 800, 900, 1,000, 1,100, 1,200, 1,300, 1,400, 1,500, 1,600, 1,700, 1,800, 1,900, 2,000, 2,500, and 3,000, 4,000, 5,000, 6,000, 7,000, 8,000, 9,000, 10,000, 20,000, 30,000, 40,000, 50,000, 60,000, 70,000, 80,000, 90,000 or up to and including 100,000 nucleotides). As used herein, the “first region” may be referred to as a “coding region” or “region encoding” or simply the “first region.”

[0050] In some embodiments, the polynucleotide, primary construct, or mmRNA includes from about 30 to about 100,000 nucleotides (e.g., from 30 to 50, from 30 to 100, from 30 to 250, from 30 to 500, from 30 to 1,000, from 30 to 1,500, from 30 to 3,000, from 30 to 5,000, from 30 to 7,000, from 30 to 10,000, from 30 to 25,000, from 30 to 50,000, from 30 to 70,000, from 100 to 250, from 100 to 500, from 100 to 1,000, from 100 to 1,500, from 100 to 3,000, from 100 to 5,000, from 100 to 7,000, from 100 to 10,000, from 100 to 25,000, from 100 to 50,000, from 100 to 70,000, from 100 to 100,000, from 500 to 1,000, from 500 to 1,500, from 500 to 2,000, from 500 to 3,000, from 500 to 5,000, from 500 to 7,000, from 500 to 10,000, from 500 to 25,000, from 500 to 50,000, from 500 to 70,000, from 500 to 100,000, from 1,000 to 1,500, from 1,000 to 2,000, from 1,000 to 3,000, from 1,000 to 5,000, from 1,000 to 7,000, from 1,000 to 10,000, from 1,000 to 25,000, from 1,000 to 50,000, from 1,000 to 70,000, from 1,000 to 100,000, from 1,500 to 3,000, from 1,500 to 5,000, from 1,500 to 7,000, from 1,500 to 10,000, from 1,500 to 25,000, from 1,500 to 50,000, from 1,500 to 70,000, from 1,500 to 100,000, from 2,000 to 3,000, from 2,000 to 5,000, from 2,000 to 7,000, from 2,000 to 10,000, from 2,000 to 25,000, from 2,000 to 50,000, from 2,000 to 70,000, and from 2,000 to 100,000).

[0051] According to the present invention, the first and second flanking regions may range independently from 15-1,000 nucleotides in length (e.g., greater than 30, 40, 45, 50, 55, 60, 70, 80, 90, 100, 120, 140, 160, 180, 200, 250, 300, 350, 400, 450, 500, 600, 700, 800, and 900 nucleotides or at least 30, 40, 45, 50, 55, 60, 70, 80, 90, 100, 120, 140, 160, 180, 200, 250, 300, 350, 400, 450, 500, 600, 700, 800, 900, and 1,000 nucleotides).

[0052] According to the present invention, the tailing sequence may range from absent to 500 nucleotides in length (e.g., at least 60, 70, 80, 90, 120, 140, 160, 180, 200, 250, 300, 350, 400, 450, or 500 nucleotides). Where the tailing region is a polyA tail, the length may be determined in units of or as a function of polyA binding protein binding. In this embodiment, the polyA tail is long enough to bind at least 4 monomers of polyA binding protein. PolyA binding protein monomers bind to stretches of approximately 38 nucleotides. As such, it has been observed that polyA tails of about 80 nucleotides and 160 nucleotides are functional.

[0053] According to the present invention, the capping region may comprise a single cap or a series of nucleotides forming the cap. In this embodiment the capping region may be from 1 to 10, e.g. 2-9, 3-8, 4-7, 1-5, 5-10, or at least 2, or 10 or fewer nucleotides in length. In some embodiments, the cap is absent.

[0054] According to the present invention, the first and second operational regions may range from 3 to 40, e.g., 5-30, 10-20, 15, or at least 4, or 30 or fewer nucleotides in length and may comprise, in addition to a start and/or stop codon, one or more signal and/or restriction sequences.

### Cyclic Polynucleotides

[0055] According to the present invention, a nucleic acid, modified RNA or primary construct may be cyclized, or concatemerized, to generate a translation competent molecule to assist interactions between poly-A binding proteins and 5′-end binding proteins. The mechanism of cyclization or concatemerization may occur through at least 3 different routes: 1) chemical, 2) enzymatic, and 3) ribozyme catalyzed. The newly formed 5′-/3′-linkage may be intramolecular or intermolecular.

[0056] In the first route, the 5′-end and the 3′-end of the nucleic acid contain chemically reactive groups that, when close together, form a new covalent linkage between the 5′-end and the 3′-end of the molecule. The 5′-end may contain an NHS-ester reactive group and the 3′-end may contain a 3′-amino-terminated nucleotide such that in an organic solvent the 3′-amino-terminated nucleotide on the 3′-end of a synthetic mRNA molecule will undergo a nucleophilic attack on the 5′-NHS-ester moiety forming a new 5′-/3′-amide bond.

[0057] In the second route, T4 RNA ligase may be used to enzymatically link a 5′-phosphorylated nucleic acid molecule to the 3′-hydroxyl group of a nucleic acid forming a new phosphorodiester linkage. In an example reaction, 1 μg of a nucleic acid molecule is incubated at 37° C. for 1 hour with 1-10 units of T4 RNA ligase (New England Biolabs, Ipswich, MA) according to the manufacturer's protocol. The ligation reaction may occur in the presence of a split oligonucleotide capable of base-pairing with both the 5′- and 3′-region in juxtaposition to assist the enzymatic ligation reaction.

[0058] In the third route, either the 5′- or 3′-end of the cDNA template encodes a ligase ribozyme sequence such that during in vitro transcription, the resultant nucleic acid molecule can contain an active ribozyme sequence capable of ligating the 5′-end of a nucleic acid molecule to the 3′-end of a nucleic acid molecule. The ligase ribozyme may be derived from the Group I Intron, Group I Intron, Hepatitis Delta Virus, Hairpin ribozyme or may be selected by SELEX (systematic evolution of ligands by exponential enrichment). The ribozyme ligase reaction may take 1 to 24 hours at temperatures between 0 and 37° C.

### Polynucleotide Multimers

[0059] According to the present invention, multiple distinct nucleic acids, modified RNA or primary constructs may be linked together through the 3′-end using nucleotides which are modified at the 3′-terminus. Chemical conjugation may be used to control the stoichiometry of delivery into cells. For example, the glyoxylate cycle enzymes, isocitrate lyase and malate synthase, may be supplied into HepG2 cells at a 1:1 ratio to alter cellular fatty acid metabolism. This ratio may be controlled by chemically linking nucleic acids or modified RNA using a 3′-azido terminated nucleotide on one nucleic acids or modified RNA species and a C5-ethynyl or alkynyl-containing nucleotide on the opposite nucleic acids or modified RNA species. The modified nucleotide is added post-transcriptionally using terminal transferase (New England Biolabs, Ipswich, MA) according to the manufacturer's protocol. After the addition of the 3′-modified nucleotide, the two nucleic acids or modified RNA species may be combined in an aqueous solution, in the presence or absence of copper, to form a new covalent linkage via a click chemistry mechanism as described in the literature.

[0060] In another example, more than two polynucleotides may be linked together using a functionalized linker molecule. For example, a functionalized saccharide molecule may be chemically modified to contain multiple chemical reactive groups (SH—, NH₂—, N₃, etc.,) to react with the cognate moiety on a 3′-functionalized mRNA molecule (i.e., a 3′-maleimide ester, 3′-NHS-ester, alkynyl). The number of reactive groups on the modified saccharide can be controlled in a stoichiometric fashion to directly control the stoichiometric ratio of conjugated nucleic acid or mRNA.

### Modified RNA Conjugates and Combinations

[0061] In order to further enhance protein production, nucleic acids, modified RNA, polynucleotides or primary constructs of the present invention can be designed to be conjugated to other polynucleotides, dyes, intercalating agents (e.g. acridines), cross-linkers (e.g. psoralene, mitomycin C), porphyrins (TPPC4, texaphyrin, Sapphyrin), polycyclic aromatic hydrocarbons (e.g., phenazine, dihydrophenazine), artificial endonucleases (e.g. EDTA), alkylating agents, phosphate, amino, mercapto, PEG (e.g., PEG-40K), MPEG, [MPEG]₂, polyamino, alkyl, substituted alkyl, radiolabeled markers, enzymes, haptens (e.g. biotin), transport/absorption facilitators (e.g., aspirin, vitamin E, folic acid), synthetic ribonucleases, proteins, e.g., glycoproteins, or peptides, e.g., molecules having a specific affinity for a co-ligand, or antibodies e.g., an antibody, that binds to a specified cell type such as a cancer cell, endothelial cell, or bone cell, hormones and hormone receptors, non-peptidic species, such as lipids, lectins, carbohydrates, vitamins, cofactors, or a drug.

[0062] Conjugation may result in increased stability and/or half life and may be particularly useful in targeting the nucleic acids, modified RNA, polynucleotides or primary constructs to specific sites in the cell, tissue or organism.

[0063] According to the present invention, the nucleic acids, modified RNA or primary construct may be administered with, or further encode one or more of RNAi agents, siRNAs, shRNAs, miRNAs, miRNA binding sites, antisense RNAs, ribozymes, catalytic DNA, tRNA, RNAs that induce triple helix formation, aptamers or vectors, and the like.

### Bifunctional Polynucleotides

[0064] In one embodiment of the invention are bifunctional polynucleotides (e.g., bifunctional nucleic acids, bifunctional modified RNA or bifunctional primary constructs). As the name implies, bifunctional polynucleotides are those having or capable of at least two functions. These molecules may also by convention be referred to as multi-functional.

[0065] The multiple functionalities of bifunctional polynucleotides may be encoded by the RNA (the function may not manifest until the encoded product is translated) or may be a property of the polynucleotide itself. It may be structural or chemical. Bifunctional modified polynucleotides may comprise a function that is covalently or electrostatically associated with the polynucleotides. Further, the two functions may be provided in the context of a complex of a modified RNA and another molecule.

[0066] Bifunctional polynucleotides may encode peptides which are anti-proliferative. These peptides may be linear, cyclic, constrained or random coil. They may function as aptamers, signaling molecules, ligands or mimics or mimetics thereof. Anti-proliferative peptides may, as translated, be from 3 to 50 amino acids in length. They may be 5-40, 10-30, or approximately 15 amino acids long. They may be single chain, multichain or branched and may form complexes, aggregates or any multi-unit structure once translated.

### Noncoding Polynucleotides

[0067] As described herein, provided are nucleic acids, modified RNA, polynucleotides and primary constructs having sequences that are partially or substantially not translatable, e.g., having a noncoding region. Such molecules are generally not translated, but can exert an effect on protein production by one or more of binding to and sequestering one or more translational machinery components such as a ribosomal protein or a transfer RNA (tRNA), thereby effectively reducing protein expression in the cell or modulating one or more pathways or cascades in a cell which in turn alters protein levels. The nucleic acids, polynucleotides, primary constructs or mRNA may contain or encode one or more long noncoding RNA (lncRNA, or lincRNA) or portion thereof, a small nucleolar RNA (sno-RNA), micro RNA (miRNA), small interfering RNA (siRNA) or Piwi-interacting RNA (piRNA).

### Polypeptides of Interest

[0068] According to the present invention, the primary construct is designed to encode one or more polypeptides of interest or fragments thereof. A polypeptide of interest may include, but is not limited to, whole polypeptides, a plurality of polypeptides or fragments of polypeptides, which independently may be encoded by one or more nucleic acids, a plurality of nucleic acids, fragments of nucleic acids or variants of any of the aforementioned. As used herein, the term “polypeptides of interest” refers to any polypeptide which is selected to be encoded in the primary construct of the present invention. As used herein, “polypeptide” means a polymer of amino acid residues (natural or unnatural) linked together most often by peptide bonds. The term, as used herein, refers to proteins, polypeptides, and peptides of any size, structure, or function. In some instances the polypeptide encoded is smaller than about 50 amino acids and the polypeptide is then termed a peptide. If the polypeptide is a peptide, it will be at least about 2, 3, 4, or at least 5 amino acid residues long. Thus, polypeptides include gene products, naturally occurring polypeptides, synthetic polypeptides, homologs, orthologs, paralogs, fragments and other equivalents, variants, and analogs of the foregoing. A polypeptide may be a single molecule or may be a multi-molecular complex such as a dimer, trimer or tetramer. They may also comprise single chain or multichain polypeptides such as antibodies or insulin and may be associated or linked. Most commonly disulfide linkages are found in multichain polypeptides. The term polypeptide may also apply to amino acid polymers in which one or more amino acid residues are an artificial chemical analogue of a corresponding naturally occurring amino acid.

[0069] The term “polypeptide variant” refers to molecules which differ in their amino acid sequence from a native or reference sequence. The amino acid sequence variants may possess substitutions, deletions, and/or insertions at certain positions within the amino acid sequence, as compared to a native or reference sequence. Ordinarily, variants will possess at least about 50% identity (homology) to a native or reference sequence, and preferably, they will be at least about 80%, more preferably at least about 90% identical (homologous) to a native or reference sequence.

[0070] In some embodiments “variant mimics” are provided. As used herein, the term “variant mimic” is one which contains one or more amino acids which would mimic an activated sequence. For example, glutamate may serve as a mimic for phosphoro-threonine and/or phosphoro-serine. Alternatively, variant mimics may result in deactivation or in an inactivated product containing the mimic, e.g., phenylalanine may act as an inactivating substitution for tyrosine; or alanine may act as an inactivating substitution for serine.

[0071] “Homology” as it applies to amino acid sequences is defined as the percentage of residues in the candidate amino acid sequence that are identical with the residues in the amino acid sequence of a second sequence after aligning the sequences and introducing gaps, if necessary, to achieve the maximum percent homology. Methods and computer programs for the alignment are well known in the art. It is understood that homology depends on a calculation of percent identity but may differ in value due to gaps and penalties introduced in the calculation.

[0072] By “homologs” as it applies to polypeptide sequences means the corresponding sequence of other species having substantial identity to a second sequence of a second species.

[0073] “Analogs” is meant to include polypeptide variants which differ by one or more amino acid alterations, e.g., substitutions, additions or deletions of amino acid residues that still maintain one or more of the properties of the parent or starting polypeptide.

[0074] The present invention contemplates several types of compositions which are polypeptide based including variants and derivatives. These include substitutional, insertional, deletion and covalent variants and derivatives. The term “derivative” is used synonymously with the term “variant” but generally refers to a molecule that has been modified and/or changed in any way relative to a reference molecule or starting molecule.

[0075] As such, polynucleotides encoding polypeptides of interest containing substitutions, insertions and/or additions, deletions and covalent modifications with respect to reference sequences are included within the scope of this invention. For example, sequence tags or amino acids, such as one or more lysines, can be added to the peptide sequences of the invention (e.g., at the N-terminal or C-terminal ends). Sequence tags can be used for peptide purification or localization. Lysines can be used to increase peptide solubility or to allow for biotinylation. Alternatively, amino acid residues located at the carboxy and amino terminal regions of the amino acid sequence of a peptide or protein may optionally be deleted providing for truncated sequences. Certain amino acids (e.g., C-terminal or N-terminal residues) may alternatively be deleted depending on the use of the sequence, as for example, expression of the sequence as part of a larger sequence which is soluble, or linked to a solid support.

[0076] “Substitutional variants” when referring to polypeptides are those that have at least one amino acid residue in a native or starting sequence removed and a different amino acid inserted in its place at the same position. The substitutions may be single, where only one amino acid in the molecule has been substituted, or they may be multiple, where two or more amino acids have been substituted in the same molecule.

[0077] As used herein the term “conservative amino acid substitution” refers to the substitution of an amino acid that is normally present in the sequence with a different amino acid of similar size, charge, or polarity. Examples of conservative substitutions include the substitution of a non-polar (hydrophobic) residue such as isoleucine, valine and leucine for another non-polar residue. Likewise, examples of conservative substitutions include the substitution of one polar (hydrophilic) residue for another such as between arginine and lysine, between glutamine and asparagine, and between glycine and serine. Additionally, the substitution of a basic residue such as lysine, arginine or histidine for another, or the substitution of one acidic residue such as aspartic acid or glutamic acid for another acidic residue are additional examples of conservative substitutions. Examples of non-conservative substitutions include the substitution of a non-polar (hydrophobic) amino acid residue such as isoleucine, valine, leucine, alanine, methionine for a polar (hydrophilic) residue such as cysteine, glutamine, glutamic acid or lysine and/or a polar residue for a non-polar residue.

[0078] “Insertional variants” when referring to polypeptides are those with one or more amino acids inserted immediately adjacent to an amino acid at a particular position in a native or starting sequence. “Immediately adjacent” to an amino acid means connected to either the alpha-carboxy or alpha-amino functional group of the amino acid.

[0079] “Deletional variants” when referring to polypeptides are those with one or more amino acids in the native or starting amino acid sequence removed. Ordinarily, deletional variants will have one or more amino acids deleted in a particular region of the molecule.

[0080] “Covalent derivatives” when referring to polypeptides include modifications of a native or starting protein with an organic proteinaceous or non-proteinaceous derivatizing agent, and/or post-translational modifications. Covalent modifications are traditionally introduced by reacting targeted amino acid residues of the protein with an organic derivatizing agent that is capable of reacting with selected side-chains or terminal residues, or by harnessing mechanisms of post-translational modifications that function in selected recombinant host cells. The resultant covalent derivatives are useful in programs directed at identifying residues important for biological activity, for immunoassays, or for the preparation of anti-protein antibodies for immunoaffinity purification of the recombinant glycoprotein. Such modifications are within the ordinary skill in the art and are performed without undue experimentation.

[0081] Certain post-translational modifications are the result of the action of recombinant host cells on the expressed polypeptide. Glutaminyl and asparaginyl residues are frequently post-translationally deamidated to the corresponding glutamyl and aspartyl residues. Alternatively, these residues are deamidated under mildly acidic conditions. Either form of these residues may be present in the polypeptides produced in accordance with the present invention.

[0082] Other post-translational modifications include hydroxylation of proline and lysine, phosphorylation of hydroxyl groups of seryl or threonyl residues, methylation of the alpha-amino groups of lysine, arginine, and histidine side chains (T. E. Creighton, Proteins: Structure and Molecular Properties, W. H. Freeman & Co., San Francisco, pp. 79-86 (1983)).

[0083] “Features” when referring to polypeptides are defined as distinct amino acid sequence-based components of a molecule. Features of the polypeptides encoded by the mmRNA of the present invention include surface manifestations, local conformational shape, folds, loops, half-loops, domains, half-domains, sites, termini or any combination thereof.

[0084] As used herein when referring to polypeptides the term “surface manifestation” refers to a polypeptide based component of a protein appearing on an outermost surface.

[0085] As used herein when referring to polypeptides the term “local conformational shape” means a polypeptide based structural manifestation of a protein which is located within a definable space of the protein.

[0086] As used herein when referring to polypeptides the term “fold” refers to the resultant conformation of an amino acid sequence upon energy minimization. A fold may occur at the secondary or tertiary level of the folding process. Examples of secondary level folds include beta sheets and alpha helices. Examples of tertiary folds include domains and regions formed due to aggregation or separation of energetic forces. Regions formed in this way include hydrophobic and hydrophilic pockets, and the like.

[0087] As used herein the term “turn” as it relates to protein conformation means a bend which alters the direction of the backbone of a peptide or polypeptide and may involve one, two, three or more amino acid residues.

[0088] As used herein when referring to polypeptides the term “loop” refers to a structural feature of a polypeptide which may serve to reverse the direction of the backbone of a peptide or polypeptide. Where the loop is found in a polypeptide and only alters the direction of the backbone, it may comprise four or more amino acid residues. Oliva et al. have identified at least 5 classes of protein loops (J. Mol Biol 266 (4): 814-830; 1997). Loops may be open or closed. Closed loops or “cyclic” loops may comprise 2, 3, 4, 5, 6, 7, 8, 9, 10 or more amino acids between the bridging moieties. Such bridging moieties may comprise a cysteine-cysteine bridge (Cys-Cys) typical in polypeptides having disulfide bridges or alternatively bridging moieties may be non-protein based such as the dibromozylyl agents used herein.

[0089] As used herein when referring to polypeptides the term “half-loop” refers to a portion of an identified loop having at least half the number of amino acid resides as the loop from which it is derived. It is understood that loops may not always contain an even number of amino acid residues. Therefore, in those cases where a loop contains or is identified to comprise an odd number of amino acids, a half-loop of the odd-numbered loop will comprise the whole number portion or next whole number portion of the loop (number of amino acids of the loop/2+/−0.5 amino acids). For example, a loop identified as a 7 amino acid loop could produce half-loops of 3 amino acids or 4 amino acids (7/2=3.5+/−0.5 being 3 or 4).

[0090] As used herein when referring to polypeptides the term “domain” refers to a motif of a polypeptide having one or more identifiable structural or functional characteristics or properties (e.g., binding capacity, serving as a site for protein-protein interactions).

[0091] As used herein when referring to polypeptides the term “half-domain” means a portion of an identified domain having at least half the number of amino acid resides as the domain from which it is derived. It is understood that domains may not always contain an even number of amino acid residues. Therefore, in those cases where a domain contains or is identified to comprise an odd number of amino acids, a half-domain of the odd-numbered domain will comprise the whole number portion or next whole number portion of the domain (number of amino acids of the domain/2+/−0.5 amino acids). For example, a domain identified as a 7 amino acid domain could produce half-domains of 3 amino acids or 4 amino acids (7/2=3.5+/−0.5 being 3 or 4). It is also understood that sub-domains may be identified within domains or half-domains, these subdomains possessing less than all of the structural or functional properties identified in the domains or half domains from which they were derived. It is also understood that the amino acids that comprise any of the domain types herein need not be contiguous along the backbone of the polypeptide (i.e., nonadjacent amino acids may fold structurally to produce a domain, half-domain or subdomain).

[0092] As used herein when referring to polypeptides the terms “site” as it pertains to amino acid based embodiments is used synonymously with “amino acid residue” and “amino acid side chain.” A site represents a position within a peptide or polypeptide that may be modified, manipulated, altered, derivatized or varied within the polypeptide based molecules of the present invention.

[0093] As used herein the terms “termini” or “terminus” when referring to polypeptides refers to an extremity of a peptide or polypeptide. Such extremity is not limited only to the first or final site of the peptide or polypeptide but may include additional amino acids in the terminal regions. The polypeptide based molecules of the present invention may be characterized as having both an N-terminus (terminated by an amino acid with a free amino group (NH2)) and a C-terminus (terminated by an amino acid with a free carboxyl group (COOH)). Proteins of the invention are in some cases made up of multiple polypeptide chains brought together by disulfide bonds or by non-covalent forces (multimers, oligomers). These sorts of proteins will have multiple N- and C-termini. Alternatively, the termini of the polypeptides may be modified such that they begin or end, as the case may be, with a non-polypeptide based moiety such as an organic conjugate.

[0094] Once any of the features have been identified or defined as a desired component of a polypeptide to be encoded by the primary construct or mmRNA of the invention, any of several manipulations and/or modifications of these features may be performed by moving, swapping, inverting, deleting, randomizing or duplicating. Furthermore, it is understood that manipulation of features may result in the same outcome as a modification to the molecules of the invention. For example, a manipulation which involved deleting a domain would result in the alteration of the length of a molecule just as modification of a nucleic acid to encode less than a full length molecule would.

[0095] Modifications and manipulations can be accomplished by methods known in the art such as, but not limited to, site directed mutagenesis. The resulting modified molecules may then be tested for activity using in vitro or in vivo assays such as those described herein or any other suitable screening assay known in the art.

[0096] According to the present invention, the polypeptides may comprise a consensus sequence which is discovered through rounds of experimentation. As used herein a “consensus” sequence is a single sequence which represents a collective population of sequences allowing for variability at one or more sites.

[0097] As recognized by those skilled in the art, protein fragments, functional protein domains, and homologous proteins are also considered to be within the scope of polypeptides of interest of this invention. For example, provided herein is any protein fragment (meaning an polypeptide sequence at least one amino acid residue shorter than a reference polypeptide sequence but otherwise identical) of a reference protein 10, 20, 30, 40, 50, 60, 70, 80, 90, 100 or greater than 100 amino acids in length. In another example, any protein that includes a stretch of about 20, about 30, about 40, about 50, or about 100 amino acids which are about 40%, about 50%, about 60%, about 70%, about 80%, about 90%, about 95%, or about 100% identical to any of the sequences described herein can be utilized in accordance with the invention. In certain embodiments, a polypeptide to be utilized in accordance with the invention includes 2, 3, 4, 5, 6, 7, 8, 9, 10, or more mutations as shown in any of the sequences provided or referenced herein.

### Encoded Polypeptides of Interest

[0098] The primary constructs, modified nucleic acids or mmRNA of the present invention may be designed to encode polypeptides of interest such as peptides and proteins.

[0099] In one embodiment, primary constructs, modified nucleic acids or mmRNA of the present invention may encode variant polypeptides which have a certain identity with a reference polypeptide sequence. As used herein, a “reference polypeptide sequence” refers to a starting polypeptide sequence. Reference sequences may be wild type sequences or any sequence to which reference is made in the design of another sequence. A “reference polypeptide sequence” may, e.g., be any one of the protein sequence listed in U.S. Provisional Patent Application No. 61/618,862, filed Apr. 2, 2012, entitled Modified Polynucleotides for the Production of Biologics, U.S. Provisional Patent Application No. 61/681,645, filed Aug. 10, 2012, entitled Modified Polynucleotides for the Production of Biologics, U.S. Provisional Patent Application No. 61/737,130, filed Dec. 14, 2012, entitled Modified Polynucleotides for the Production of Biologics, U.S. Provisional Patent Application No. 61/618,866, filed Apr. 2, 2012, entitled Modified Polynucleotides for the Production of Antibodies, U.S. Provisional Patent Application No. 61/681,647, filed Aug. 10, 2012, entitled Modified Polynucleotides for the Production of Antibodies, U.S. Provisional Patent Application No. 61/737,134, filed Dec. 14, 2012, entitled Modified Polynucleotides for the Production of Antibodies, U.S. Provisional Patent Application No. 61/618,868, filed Apr. 2, 2012, entitled Modified Polynucleotides for the Production of Vaccines, U.S. Provisional Patent Application No. 61/681,648, filed Aug. 10, 2012, entitled Modified Polynucleotides for the Production of Vaccines, U.S. Provisional Patent Application No. 61/737,135, filed Dec. 14, 2012, entitled Modified Polynucleotides for the Production of Vaccines, U.S. Provisional Patent Application No. 61/618,870, filed Apr. 2, 2012, entitled Modified Polynucleotides for the Production of Therapeutic Proteins and Peptides, U.S. Provisional Patent Application No. 61/681,649, filed Aug. 10, 2012, entitled Modified Polynucleotides for the Production of Therapeutic Proteins and Peptides, U.S. Provisional Patent Application No. 61/737,139, filed Dec. 14, 2012, Modified Polynucleotides for the Production of Therapeutic Proteins and Peptides, U.S. Provisional Patent Application No. 61/618,873, filed Apr. 2, 2012, entitled Modified Polynucleotides for the Production of Secreted Proteins, U.S. Provisional Patent Application No. 61/681,650, filed Aug. 10, 2012, entitled Modified Polynucleotides for the Production of Secreted Proteins, U.S. Provisional Patent Application No. 61/737,147, filed Dec. 14, 2012, entitled Modified Polynucleotides for the Production of Secreted Proteins, U.S. Provisional Patent Application No. 61/618,878, filed Apr. 2, 2012, entitled Modified Polynucleotides for the Production of Plasma Membrane Proteins, U.S. Provisional Patent Application No. 61/681,654, filed Aug. 10, 2012, entitled Modified Polynucleotides for the Production of Plasma Membrane Proteins, U.S. Provisional Patent Application No. 61/737,152, filed Dec. 14, 2012, entitled Modified Polynucleotides for the Production of Plasma Membrane Proteins, U.S. Provisional Patent Application No. 61/618,885, filed Apr. 2, 2012, entitled Modified Polynucleotides for the Production of Cytoplasmic and Cytoskeletal Proteins, U.S. Provisional Patent Application No. 61/681,658, filed Aug. 10, 2012, entitled Modified Polynucleotides for the Production of Cytoplasmic and Cytoskeletal Proteins, U.S. Provisional Patent Application No. 61/737,155, filed Dec. 14, 2012, entitled Modified Polynucleotides for the Production of Cytoplasmic and Cytoskeletal Proteins, U.S. Provisional Patent Application No. 61/618,896, filed Apr. 2, 2012, entitled Modified Polynucleotides for the Production of Intracellular Membrane Bound Proteins, U.S. Provisional Patent Application No. 61/668,157, filed Jul. 5, 2012, entitled Modified Polynucleotides for the Production of Intracellular Membrane Bound Proteins, U.S. Provisional Patent Application No. 61/681,661, filed Aug. 10, 2012, entitled Modified Polynucleotides for the Production of Intracellular Membrane Bound Proteins, U.S. Provisional Patent Application No. 61/737,160, filed Dec. 14, 2012, entitled Modified Polynucleotides for the Production of Intracellular Membrane Bound Proteins, U.S. Provisional Patent Application No. 61/618,911, filed Apr. 2, 2012, entitled Modified Polynucleotides for the Production of Nuclear Proteins, U.S. Provisional Patent Application No. 61/681,667, filed Aug. 10, 2012, entitled Modified Polynucleotides for the Production of Nuclear Proteins, U.S. Provisional Patent Application No. 61/737,168, filed Dec. 14, 2012, entitled Modified Polynucleotides for the Production of Nuclear Proteins, U.S. Provisional Patent Application No. 61/618,922, filed Apr. 2, 2012, entitled Modified Polynucleotides for the Production of Proteins, U.S. Provisional Patent Application No. 61/681,675, filed Aug. 10, 2012, entitled Modified Polynucleotides for the Production of Proteins, U.S. Provisional Patent Application No. 61/737,174, filed Dec. 14, 2012, entitled Modified Polynucleotides for the Production of Proteins, U.S. Provisional Patent Application No. 61/618,935, filed Apr. 2, 2012, entitled Modified Polynucleotides for the Production of Proteins Associated with Human Disease, U.S. Provisional Patent Application No. 61/681,687, filed Aug. 10, 2012, entitled Modified Polynucleotides for the Production of Proteins Associated with Human Disease, U.S. Provisional Patent Application No. 61/737,184, filed Dec. 14, 2012, entitled Modified Polynucleotides for the Production of Proteins Associated with Human Disease, U.S. Provisional Patent Application No. 61/618,945, filed Apr. 2, 2012, entitled Modified Polynucleotides for the Production of Proteins Associated with Human Disease, U.S. Provisional Patent Application No. 61/681,696, filed Aug. 10, 2012, entitled Modified Polynucleotides for the Production of Proteins Associated with Human Disease, U.S. Provisional Patent Application No. 61/737,191, filed Dec. 14, 2012, entitled Modified Polynucleotides for the Production of Proteins Associated with Human Disease, U.S. Patent Application No. 61/618,953, filed Apr. 2, 2012, entitled Modified Polynucleotides for the Production of Proteins Associated with Human Disease, U.S. Patent Application No. 61/681,704, filed Aug. 10, 2012, entitled Modified Polynucleotides for the Production of Proteins Associated with Human Disease, U.S. Patent Application No. 61/737,203, filed Dec. 14, 2012, entitled Modified Polynucleotides for the Production of Proteins Associated with Human Disease, International Application No PCT/US2013/030062, filed Mar. 9, 2013, entitled Modified Polynucleotides for the Production of Biologics and Proteins Associated with Human Disease; International Application No PCT/US2013/030063, filed Mar. 9, 2013, entitled Modified Polynucloetides; International Application No. PCT/US2013/030064, entitled Modified Polynucleotides for the Production of Secreted Proteins; International Application No PCT/US2013/030059, filed Mar. 9, 2013, entitled Modified Polynucleotides for the Production of Membrane Proteins; International Application No. PCT/US2013/030066, filed Mar. 9, 2013, entitled Modified Polynucleotides for the Production of Cytoplasmic and Cytoskeletal Proteins; International Application No. PCT/US2013/030067, filed Mar. 9, 2013, entitled Modified Polynucleotides for the Production of Nuclear Proteins; International Application No. PCT/US2013/030060, filed Mar. 9, 2013, entitled Modified Polynucleotides for the Production of Proteins; International Application No. PCT/US2013/030061, filed Mar. 9, 2013, entitled Modified Polynucleotides for the Production of Proteins Associated with Human Disease; International Application No. PCT/US2013/030068, filed Mar. 9, 2013, entitled Modified Polynucleotides for the Production of Cosmetic Proteins and Peptides; International Application No. PCT/US2013/030070, filed Mar. 9, 2013, entitled Modified Polynucleotides for the Production of Oncology-Related Proteins and Peptides; and International Application No. PCT/US2013/031821, filed Mar. 15, 2013, entitled In Vivo Production of Proteins, the contents of each of which are herein incorporated by reference in their entireties.

[0100] The term “identity” as known in the art, refers to a relationship between the sequences of two or more peptides, as determined by comparing the sequences. In the art, identity also means the degree of sequence relatedness between peptides, as determined by the number of matches between strings of two or more amino acid residues. Identity measures the percent of identical matches between the smaller of two or more sequences with gap alignments (if any) addressed by a particular mathematical model or computer program (i.e., “algorithms”). Identity of related peptides can be readily calculated by known methods. Such methods include, but are not limited to, those described in Computational Molecular Biology, Lesk, A. M., ed., Oxford University Press, New York, 1988; Biocomputing: Informatics and Genome Projects, Smith, D. W., ed., Academic Press, New York, 1993; Computer Analysis of Sequence Data, Part 1, Griffin, A. M., and Griffin, H. G., eds., Humana Press, New Jersey, 1994; Sequence Analysis in Molecular Biology, von Heinje, G., Academic Press, 1987; Sequence Analysis Primer, Gribskov, M. and Devereux, J., eds., M. Stockton Press, New York, 1991; and Carillo et al., SIAM J. Applied Math. 48, 1073 (1988).

[0101] In some embodiments, the polypeptide variant may have the same or a similar activity as the reference polypeptide. Alternatively, the variant may have an altered activity (e.g., increased or decreased) relative to a reference polypeptide. Generally, variants of a particular polynucleotide or polypeptide of the invention will have at least about 40%, 45%, 50%, 55%, 60%, 65%, 70%, 75%, 80%, 85%, 90%, 91%, 92%, 93%, 94%, 95%, 96%, 97%, 98%, 99% but less than 100% sequence identity to that particular reference polynucleotide or polypeptide as determined by sequence alignment programs and parameters described herein and known to those skilled in the art. Such tools for alignment include those of the BLAST suite (Stephen F. Altschul, Thomas L. Madden, Alejandro A. Schaffer, Jinghui Zhang, Zheng Zhang, Webb Miller, and David J. Lipman (1997), “Gapped BLAST and PSI-BLAST: a new generation of protein database search programs”, Nucleic Acids Res. 25:3389-3402.) Other tools are described herein, specifically in the definition of “identity.”

[0102] Default parameters in the BLAST algorithm include, for example, an expect threshold of 10, Word size of 28, Match/Mismatch Scores 1, −2, Gap costs Linear. Any filter can be applied as well as a selection for species specific repeats, e.g., Homo sapiens.

[0103] In one embodiment, the polynucleotides, primary constructs, modified nucleic acids and/or mmRNA may be used to treat a disease, disorder and/or condition in a subject.

[0104] In one embodiment, the polynucleotides, primary constructs, modified nucleic acids and/or mmRNA may be used to reduce, eliminate or prevent tumor growth in a subject.

[0105] In one embodiment, the polynucleotides, primary constructs and/or mmRNA may be used to reduce and/or ameliorate at least one symptom of cancer in a subject. A symptom of cancer may include, but is not limited to, weakness, aches and pains, fever, fatigue, weight loss, blood clots, increased blood calcium levels, low white blood cell count, short of breath, dizziness, headaches, hyperpigmentation, jaundice, erthema, pruritis, excessive hair growth, change in bowel habits, change in bladder function, long-lasting sores, white patches inside the mouth, white spots on the tongue, unusual bleeding or discharge, thickening or lump on parts of the body, indigestion, trouble swallowing, changes in warts or moles, change in new skin and nagging cough or hoarseness. Further, the polynucleotides, primary constructs, modified nucleic acid and/or mmRNA may reduce a side-effect associated with cancer such as, but not limited to, chemo brain, peripheral neuropathy, fatigue, depression, nausea, vomiting, pain, anemia, lymphedema, infections, sexual side effects, reduced fertility or infertility, ostomics, insomnia and hair loss.

### Terminal Architecture Modifications: Untranslated Regions (UTRs)

[0106] Untranslated regions (UTRs) of a gene are transcribed but not translated. The 5′UTR starts at the transcription start site and continues to the start codon but does not include the start codon; whereas, the 3′UTR starts immediately following the stop codon and continues until the transcriptional termination signal. There is growing body of evidence about the regulatory roles played by the UTRs in terms of stability of the nucleic acid molecule and translation. The regulatory features of a UTR can be incorporated into the nucleic acids or modified RNA of the present invention to enhance the stability of the molecule. The specific features can also be incorporated to ensure controlled down-regulation of the transcript in case they are misdirected to undesired organs sites. The untranslated regions may be incorporated into a vector system which can produce mRNA and/or be delivered to a cell, tissue and/or organism to produce a polypeptide of interest.

### 5′ UTR and Translation Initiation

[0107] Natural 5′UTRs bear features which play roles in for translation initiation. They harbor signatures like Kozak sequences which are commonly known to be involved in the process by which the ribosome initiates translation of many genes. Kozak sequences have the consensus CCR(A/G)CCAUGG, where R is a purine (adenine or guanine) three bases upstream of the start codon (AUG), which is followed by another ‘G’. 5′UTR also have been known to form secondary structures which are involved in elongation factor binding.

[0108] 5′UTR secondary structures involved in elongation factor binding can interact with other RNA binding molecules in the 5′UTR or 3′UTR to regulate gene expression. For example, the elongation factor EIF4A2 binding to a secondarily structured element in the 5′UTR is necessary for microRNA mediated repression (Meijer H A et al., Science, 2013, 340, 82-85, herein incorporated by reference in its entirety). The different secondary structures in the 5′UTR can be incorporated into the flanking region to either stabilize or selectively destalized mRNAs in specific tissues or cells.

[0109] By engineering the features typically found in abundantly expressed genes of specific target organs, one can enhance the stability and protein production of the nucleic acids or mRNA of the invention. For example, introduction of 5′ UTR of liver-expressed mRNA, such as albumin, serum amyloid A, Apolipoprotein A/B/E, transferrin, alpha fetoprotein, erythropoietin, or Factor VIII, could be used to enhance expression of a nucleic acid molecule, such as a mmRNA, in hepatic cell lines or liver. Likewise, use of 5′ UTR from other tissue-specific mRNA to improve expression in that tissue is possible—for muscle (MyoD, Myosin, Myoglobin, Myogenin, Herculin), for endothelial cells (Tie-1, CD36), for myeloid cells (C/EBP, AML1, G-CSF, GM-CSF, CD11b, MSR, Fr-1, i-NOS), for leukocytes (CD45, CD18), for adipose tissue (CD36, GLUT4, ACRP30, adiponectin) and for lung epithelial cells (SP-A/B/C/D).

[0110] Other non-UTR sequences may be incorporated into the 5′ (or 3′ UTR) UTRs. For example, introns or portions of introns sequences may be incorporated into the flanking regions of the nucleic acids or mRNA of the invention. Incorporation of intronic sequences may increase protein production as well as mRNA levels.

[0111] In one embodiment, at least one fragment of IRES sequences from a GTX gene may be included in the 5′UTR. As a non-limiting example, the fragment may be an 18 nucleotide sequence from the IRES of the GTX gene. As another non-limiting example, an 18 nucleotide sequence fragment from the IRES sequence of a GTX gene may be tandemly repeated in the 5′UTR of a polynucleotide described herein. The 18 nucleotide sequence may be repeated in the 5′UTR at least one, at least twice, at least three times, at least four times, at least five times, at least six times, at least seven times, at least eight times, at least nine times or more than ten times

[0112] In one embodiment, a 5′UTR may include at least five 18 nucleotide fragments of IRES sequences from a GTX gene may be included in the 5′UTR (see e.g., the 18 nucleotide fragment described in Table 62).

[0113] Nucleotides may be mutated, replaced and/or removed from the 5′ (or 3′) UTRs. For example, one or more nucleotides upstream of the start codon may be replaced with another nucleotide. The nucleotide or nucleotides to be replaced may be 1, 2, 3, 4, 5, 6, 7, 8, 9, 10, 11, 12, 13, 14, 15, 16, 17, 18, 19, 20, 21, 22, 23, 24, 25, 30, 35, 40, 45, 50, 55, 60 or more than 60 nucleotides upstream of the start codon. As another example, one or more nucleotides upstream of the start codon may be removed from the UTR.

[0114] In one embodiment, at least one purine upstream of the start codon may be replaced with a pyrimidine. The purine to be replaced may be 1, 2, 3, 4, 5, 6, 7, 8, 9, 10, 11, 12, 13, 14, 15, 16, 17, 18, 19, 20, 21, 22, 23, 24, 25, 30, 35, 40, 45, 50, 55, 60 or more than 60 nucleotides upstream of the start codon. As a non-limiting example, an adenine which is three nucleotides upstream of the start codon may be replaced with a thymine. As another non-limiting example, an adenine which is nine nucleotides upstream of the start codon may be replaced with a thymine.

[0115] In one embodiment, at least one nucleotide upstream of the start codon may be removed from the UTR. In one aspect, 1, 2, 3, 4, 5, 6, 7, 8, 9, 10, 11, 12, 13, 14, 15, 16, 17, 18, 19, 20, 21, 22, 23, 24, 25, 30, 35, 40, 45, 50, 55, 60 or more than 60 nucleotides upstream of the start codon may be removed from the UTR of the polynucleotides described herein. As a non-limiting example, the nine nucleotides upstream of the start codon may be removed from the UTR (See e.g., the G-CSF 9del5′ construct described in Table 60).

### 5′UTR, 3′UTR and Translation Enhancer Elements (TEEs)

[0116] In one embodiment, the 5′UTR of the polynucleotides, primary constructs, modified nucleic acids and/or mmRNA may include at least one translational enhancer polynucleotide, translation enhancer element, translational enhancer elements (collectively referred to as “TEE”s). As a non-limiting example, the TEE may be located between the transcription promoter and the start codon. The polynucleotides, primary constructs, modified nucleic acids and/or mmRNA with at least one TEE in the 5′UTR may include a cap at the 5′UTR. Further, at least one TEE may be located in the 5′UTR of polynucleotides, primary constructs, modified nucleic acids and/or mmRNA undergoing cap-dependent or cap-independent translation.

[0117] The term “translational enhancer element” or “translation enhancer element” (herein collectively referred to as “TEE”) refers to sequences that increase the amount of polypeptide or protein produced from an mRNA.

[0118] In one aspect, TEEs are conserved elements in the UTR which can promote translational activity of a nucleic acid such as, but not limited to, cap-dependent or cap-independent translation. The conservation of these sequences has been previously shown by Panek et al (Nucleic Acids Research, 2013, 1-10; herein incorporated by reference in its entirety) across 14 species including humans.

[0119] In one embodiment, the TEE may be any of the TEEs listed in Table 32 in Example 45, including portion and/or fragments thereof. The TEE sequence may include at least 5%, at least 10%, at least 15%, at least 20%, at least 25%, at least 30%, at least 35%, at least 40%, at least 45%, at least 50%, at least 55%, at least 60%, at least 65%, at least 70%, at least 75%, at least 80%, at least 85%, at least 90%, at least 95%, at least 99% or more than 99% of the TEE sequences disclosed in Table 32 and/or the TEE sequence may include a 5-30 nucleotide fragment, a 5-25 nucleotide fragment, a 5-20 nucleotide fragment, a 5-15 nucleotide fragment, a 5-10 nucleotide fragment of the TEE sequences disclosed in Table 32.

[0120] In one non-limiting example, the TEEs known may be in the 5′-leader of the Gtx homeodomain protein (Chappell et al., Proc. Natl. Acad. Sci. USA 101:9590-9594, 2004, herein incorporated by reference in their entirety).

[0121] In another non-limiting example, TEEs are disclosed as SEQ ID NOs: 1-35 in US Patent Publication No. US20090226470, SEQ ID NOs: 1-35 in US Patent Publication US20130177581, SEQ ID NOs: 1-35 in International Patent Publication No. WO2009075886, SEQ ID NOs: 1-5, and 7-645 in International Patent Publication No. WO2012009644, SEQ ID NO: 1 in International Patent Publication No. WO1999024595, SEQ ID NO: 1 in U.S. Pat. No. 6,310,197, and SEQ ID NO: 1 in U.S. Pat. No. 6,849,405, each of which is herein incorporated by reference in its entirety.

[0122] In yet another non-limiting example, the TEE may be an internal ribosome entry site (IRES), HCV-IRES or an IRES element such as, but not limited to, those described in U.S. Pat. No. 7,468,275, US Patent Publication Nos. US20070048776 and US20110124100 and International Patent Publication Nos. WO2007025008 and WO2001055369, each of which is herein incorporated by reference in its entirety. The IRES elements may include, but are not limited to, the Gtx sequences (e.g., Gtx9-nt, Gtx8-nt, Gtx7-nt) described by Chappell et al. (Proc. Natl. Acad. Sci. USA 101:9590-9594, 2004) and Zhou et al. (PNAS 102:6273-6278, 2005) and in US Patent Publication Nos. US20070048776 and US20110124100 and International Patent Publication No. WO2007025008, each of which is herein incorporated by reference in its entirety.

[0123] “Translational enhancer polynucleotides” or “translation enhancer polynucleotide sequences” are polynucleotides which include one or more of the specific TEE exemplified herein and/or disclosed in the art (see e.g., U.S. Pat. Nos. 6,310,197, 6,849,405, 7,456,273, 7,183,395, US20090226470, US20070048776, US20110124100, US20090093049, US20130177581, WO2009075886, WO2007025008, WO2012009644, WO2001055371 WO1999024595, and EP2610341A1 and EP2610340A1; each of which is herein incorporated by reference in its entirety) or their variants, homologs or functional derivatives. One or multiple copies of a specific TEE can be present in the polynucleotides, primary constructs, modified nucleic acids and/or mmRNA. The TEEs in the translational enhancer polynucleotides can be organized in one or more sequence segments. A sequence segment can harbor one or more of the specific TEEs exemplified herein, with each TEE being present in one or more copies. When multiple sequence segments are present in a translational enhancer polynucleotide, they can be homogenous or heterogeneous. Thus, the multiple sequence segments in a translational enhancer polynucleotide can harbor identical or different types of the specific TEEs exemplified herein, identical or different number of copies of each of the specific TEEs, and/or identical or different organization of the TEEs within each sequence segment.

[0124] In one embodiment, the polynucleotides, primary constructs, modified nucleic acids and/or mmRNA may include at least one TEE that is described in International Patent Publication No. WO1999024595, WO2012009644, WO2009075886, WO2007025008, WO1999024595, European Patent Publication No. EP2610341A1 and EP2610340A1, U.S. Pat. Nos. 6,310,197, 6,849,405, 7,456,273, 7,183,395, US Patent Publication No. US20090226470, US20110124100, US20070048776, US20090093049, and US20130177581 each of which is herein incorporated by reference in its entirety. The TEE may be located in the 5′UTR of the polynucleotides, primary constructs, modified nucleic acids and/or mmRNA.

[0125] In another embodiment, the polynucleotides, primary constructs, modified nucleic acids and/or mmRNA may include at least one TEE that has at least 50%, at least 55%, at least 60%, at least 65%, at least 70%, at least 75%, at least 80%, at least 85%, at least 90%, at least 95% or at least 99% identity with the TEEs described in US Patent Publication Nos. US20090226470, US20070048776, US20130177581 and US20110124100, International Patent Publication No. WO1999024595, WO2012009644, WO2009075886 and WO2007025008, European Patent Publication No. EP2610341A1 and EP2610340A1, U.S. Pat. Nos. 6,310,197, 6,849,405, 7,456,273, 7,183,395, each of which is herein incorporated by reference in its entirety.

[0126] In one embodiment, the 5′UTR of the polynucleotides, primary constructs, modified nucleic acids and/or mmRNA may include at least 1, at least 2, at least 3, at least 4, at least 5, at least 6, at least 7, at least 8, at least 9, at least 10, at least 11, at least 12, at least 13, at least 14, at least 15, at least 16, at least 17, at least 18 at least 19, at least 20, at least 21, at least 22, at least 23, at least 24, at least 25, at least 30, at least 35, at least 40, at least 45, at least 50, at least 55 or more than 60 TEE sequences. The TEE sequences in the 5′UTR of the polynucleotides, primary constructs, modified nucleic acids and/or mmRNA of the present invention may be the same or different TEE sequences. The TEE sequences may be in a pattern such as ABABAB or AABBAABBAABB or ABCABCABC or variants thereof repeated once, twice, or more than three times. In these patterns, each letter, A, B, or C represent a different TEE sequence at the nucleotide level.

[0127] In one embodiment, the 5′UTR may include a spacer to separate two TEE sequences. As a non-limiting example, the spacer may be a 15 nucleotide spacer and/or other spacers known in the art. As another non-limiting example, the 5′UTR may include a TEE sequence-spacer module repeated at least once, at least twice, at least 3 times, at least 4 times, at least 5 times, at least 6 times, at least 7 times, at least 8 times and at least 9 times or more than 9 times in the 5′UTR.

[0128] In another embodiment, the spacer separating two TEE sequences may include other sequences known in the art which may regulate the translation of the polynucleotides, primary constructs, modified nucleic acids and/or mmRNA of the present invention such as, but not limited to, miR sequences described herein (e.g., miR binding sites and miR seeds). As a non-limiting example, each spacer used to separate two TEE sequences may include a different miR sequence or component of a miR sequence (e.g., miR seed sequence).

[0129] In one embodiment, the TEE in the 5′UTR of the polynucleotides, primary constructs, modified nucleic acids and/or mmRNA of the present invention may include at least 5%, at least 10%, at least 15%, at least 20%, at least 25%, at least 30%, at least 35%, at least 40%, at least 45%, at least 50%, at least 55%, at least 60%, at least 65%, at least 70%, at least 75%, at least 80%, at least 85%, at least 90%, at least 95%, at least 99% or more than 99% of the TEE sequences disclosed in US Patent Publication Nos. US20090226470, US20070048776, US20130177581 and US20110124100, International Patent Publication No. WO1999024595, WO2012009644, WO2009075886 and WO2007025008, European Patent Publication No. EP2610341A1 and EP2610340A1, U.S. Pat. Nos. 6,310,197, 6,849,405, 7,456,273, 7,183,395. In another embodiment, the TEE in the 5′UTR of the polynucleotides, primary constructs, modified nucleic acids and/or mmRNA of the present invention may include a 5-30 nucleotide fragment, a 5-25 nucleotide fragment, a 5-20 nucleotide fragment, a 5-15 nucleotide fragment, a 5-10 nucleotide fragment of the TEE sequences disclosed in US Patent Publication Nos. US20090226470, US20070048776, US20130177581 and US20110124100, International Patent Publication No. WO1999024595, WO2012009644, WO2009075886 and WO2007025008, European Patent Publication No. EP2610341A1 and EP2610340A1, U.S. Pat. Nos. 6,310,197, 6,849,405, 7,456,273, 7,183,395; each of which are herein incorporated by reference in their entirety.

[0130] In one embodiment, the TEE in the 5′UTR of the polynucleotides, primary constructs, modified nucleic acids and/or mmRNA of the present invention may include at least 5%, at least 10%, at least 15%, at least 20%, at least 25%, at least 30%, at least 35%, at least 40%, at least 45%, at least 50%, at least 55%, at least 60%, at least 65%, at least 70%, at least 75%, at least 80%, at least 85%, at least 90%, at least 95%, at least 99% or more than 99% of the TEE sequences disclosed in Chappell et al. (Proc. Natl. Acad. Sci. USA 101:9590-9594, 2004) and Zhou et al. (PNAS 102:6273-6278, 2005), in Supplemental Table 1 and in Supplemental Table 2 disclosed by Wellensiek et al (Genome-wide profiling of human cap-independent translation-enhancing elements, Nature Methods, 2013; DOI:10.1038/NMETH.2522); each of which is herein incorporated by reference in its entirety. In another embodiment, the TEE in the 5′UTR of the polynucleotides, primary constructs, modified nucleic acids and/or mmRNA of the present invention may include a 5-30 nucleotide fragment, a 5-25 nucleotide fragment, a 5-20 nucleotide fragment, a 5-15 nucleotide fragment, a 5-10 nucleotide fragment of the TEE sequences disclosed in Chappell et al. (Proc. Natl. Acad. Sci. USA 101:9590-9594, 2004) and Zhou et al. (PNAS 102:6273-6278, 2005), in Supplemental Table 1 and in Supplemental Table 2 disclosed by Wellensiek et al (Genome-wide profiling of human cap-independent translation-enhancing elements, Nature Methods, 2013; DOI:10.1038/NMETH.2522); each of which is herein incorporated by reference in its entirety.

[0131] In one embodiment, the TEE used in the 5′UTR of the polynucleotides, primary constructs, modified nucleic acids and/or mmRNA of the present invention is an IRES sequence such as, but not limited to, those described in U.S. Pat. No. 7,468,275 and International Patent Publication No. WO2001055369, each of which is herein incorporated by reference in its entirety.

[0132] In one embodiment, the TEEs used in the 5′UTR of the polynucleotides, primary constructs, modified nucleic acids and/or mmRNA of the present invention may be identified by the methods described in US Patent Publication No. US20070048776 and US20110124100 and International Patent Publication Nos. WO2007025008 and WO2012009644, each of which is herein incorporated by reference in its entirety.

[0133] In another embodiment, the TEEs used in the 5′UTR of the polynucleotides, primary constructs, modified nucleic acids and/or mmRNA of the present invention may be a transcription regulatory element described in U.S. Pat. Nos. 7,456,273 and 7,183,395, US Patent Publication No. US20090093049, and International Publication No. WO2001055371, each of which is herein incorporated by reference in their entirety. The transcription regulatory elements may be identified by methods known in the art, such as, but not limited to, the methods described in U.S. Pat. Nos. 7,456,273 and 7,183,395, US Patent Publication No. US20090093049, and International Publication No. WO2001055371, each of which is herein incorporated by reference in their entirety.

[0134] In yet another embodiment, the TEE used in the 5′UTR of the polynucleotides, primary constructs, modified nucleic acids and/or mmRNA of the present invention is an oligonucleotide or portion thereof as described in U.S. Pat. Nos. 7,456,273 and 7,183,395, US Patent Publication No. US20090093049, and International Publication No. WO2001055371, each of which is herein incorporated by reference in their entirety.

[0135] The 5′ UTR comprising at least one TEE described herein may be incorporated in a monocistronic sequence such as, but not limited to, a vector system or a nucleic acid vector. As a non-limiting example, the vector systems and nucleic acid vectors may include those described in U.S. Pat. Nos. 7,456,273 and 7,183,395, US Patent Publication No. US20070048776, US20090093049 and US20110124100 and International Patent Publication Nos. WO2007025008 and WO2001055371, each of which is herein incorporated by reference in its entirety.

[0136] In one embodiment, the TEEs described herein may be located in the 5′UTR and/or the 3′UTR of the polynucleotides, primary constructs, modified nucleic acids and/or mmRNA. The TEEs located in the 3′UTR may be the same and/or different than the TEEs located in and/or described for incorporation in the 5′UTR.

[0137] In one embodiment, the 3′UTR of the polynucleotides, primary constructs, modified nucleic acids and/or mmRNA may include at least 1, at least 2, at least 3, at least 4, at least 5, at least 6, at least 7, at least 8, at least 9, at least 10, at least 11, at least 12, at least 13, at least 14, at least 15, at least 16, at least 17, at least 18 at least 19, at least 20, at least 21, at least 22, at least 23, at least 24, at least 25, at least 30, at least 35, at least 40, at least 45, at least 50, at least 55 or more than 60 TEE sequences. The TEE sequences in the 3′UTR of the polynucleotides, primary constructs, modified nucleic acids and/or mmRNA of the present invention may be the same or different TEE sequences. The TEE sequences may be in a pattern such as ABABAB or AABBAABBAABB or ABCABCABC or variants thereof repeated once, twice, or more than three times. In these patterns, each letter, A, B, or C represent a different TEE sequence at the nucleotide level.

[0138] In one embodiment, the 3′UTR may include a spacer to separate two TEE sequences. As a non-limiting example, the spacer may be a 15 nucleotide spacer and/or other spacers known in the art. As another non-limiting example, the 3′UTR may include a TEE sequence-spacer module repeated at least once, at least twice, at least 3 times, at least 4 times, at least 5 times, at least 6 times, at least 7 times, at least 8 times and at least 9 times or more than 9 times in the 3′UTR.

[0139] In another embodiment, the spacer separating two TEE sequences may include other sequences known in the art which may regulate the translation of the polynucleotides, primary constructs, modified nucleic acids and/or mmRNA of the present invention such as, but not limited to, miR sequences described herein (e.g., miR binding sites and miR seeds). As a non-limiting example, each spacer used to separate two TEE sequences may include a different miR sequence or component of a miR sequence (e.g., miR seed sequence).

[0140] In one embodiment, the incorporation of a miR sequence and/or a TEE sequence changes the shape of the stem loop region which may increase and/or decrease translation. (see e.g, Kedde et al. A Pumilio-induced RNA structure switch in p27-3′UTR controls miR-221 and miR-22 accessibility. Nature Cell Biology. 2010, herein incorporated by reference in its entirety).

### Heterologous 5′UTRs

[0141] A 5′ UTR may be provided as a flanking region to the modified nucleic acids (mRNA), enhanced modified RNA or ribonucleic acids of the invention. 5′UTR may be homologous or heterologous to the coding region found in the modified nucleic acids (mRNA), enhanced modified RNA or ribonucleic acids of the invention. Multiple 5′ UTRs may be included in the flanking region and may be the same or of different sequences. Any portion of the flanking regions, including none, may be codon optimized and any may independently contain one or more different structural or chemical modifications, before and/or after codon optimization.

[0142] Shown in Lengthy Table 21 in U.S. Provisional Application No. 61/775,509, filed Mar. 9, 2013, entitled Heterologous Untranslated Regions for mRNA and in Lengthy Table 21 and in Table 22 in U.S. Provisional Application No. 61/829,372, filed May 31, 2013, entitled Heterologous Untranslated Regions for mRNA, the contents of each of which is herein incorporated by reference in its entirety, is a listing of the start and stop site of the modified nucleic acids (mRNA), enhanced modified RNA or ribonucleic acids of the invention. In Table 21 each 5′UTR (5′UTR-005 to 5′UTR 68511) is identified by its start and stop site relative to its native or wild type (homologous) transcript (ENST; the identifier used in the ENSEMBL database).

[0143] Additional 5′UTR which may be used with the modified nucleic acids, enhanced modified RNA or ribonucleic acids of the invention are shown in the present disclosure in Table 6, Table 38 and Table 41.

[0144] To alter one or more properties of the polynucleotides, primary constructs or mmRNA of the invention, 5′UTRs which are heterologous to the coding region of the modified nucleic acids (mRNA), enhanced modified RNA or ribonucleic acids of the invention are engineered into compounds of the invention. The modified nucleic acids (mRNA), enhanced modified RNA or ribonucleic acids are then administered to cells, tissue or organisms and outcomes such as protein level, localization and/or half life are measured to evaluate the beneficial effects the heterologous 5′UTR may have on the modified nucleic acids (mRNA), enhanced modified RNA or ribonucleic acids of the invention. Variants of the 5′ UTRs may be utilized wherein one or more nucleotides are added or removed to the termini, including A, T, C or G. 5′UTRs may also be codon-optimized or modified in any manner described herein.

Incorporating microRNA Binding Sites

[0145] In one embodiment modified nucleic acids (mRNA), enhanced modified RNA or ribonucleic acids of the invention would not only encode a polypeptide but also a sensor sequence. Sensor sequences include, for example, microRNA binding sites, transcription factor binding sites, structured mRNA sequences and/or motifs, artificial binding sites engineered to act as pseudo-receptors for endogenous nucleic acid binding molecules. Non-limiting examples, of polynucleotides comprising at least one sensor sequence are described in co-pending and co-owned U.S. Provisional Patent Application No. U.S. 61/753,661, filed Jan. 17, 2013, entitled Signal-Sensor Polynucleotide for the Alteration of Cellular Phenotypes and Microenvironments, U.S. Provisional Patent Application No. U.S. 61/754,159, filed Jan. 18, 2013, entitled Signal-Sensor Polynucleotide for the Alteration of Cellular Phenotypes and Microenvironments, U.S. Provisional Patent Application No. U.S. 61/781,097, filed Mar. 14, 2013, entitled Signal-Sensor Polynucleotide for the Alteration of Cellular Phenotypes and Microenvironments, U.S. Provisional Patent Application No. U.S. 61/829,334, filed May 31, 2013, entitled Signal-Sensor Polynucleotide for the Alteration of Cellular Phenotypes and Microenvironments, U.S. Provisional Patent Application No. U.S. 61/839,893, filed Jun. 27, 2013, entitled Signal-Sensor Polynucleotide for the Alteration of Cellular Phenotypes and Microenvironments, U.S. Provisional Patent Application No. U.S. 61/842,733, filed Jul. 3, 2013, entitled Signal-Sensor Polynucleotide for the Alteration of Cellular Phenotypes and Microenvironment, and US Provisional Patent Application No. U.S. 61/857,304, filed Jul. 23, 2013, entitled Signla-Sensor Polynucleotide for the Alteration of Cellular Phenotypes and Microenvironment, the contents of each of which are herein incorporated by reference in its entirety.

[0146] In one embodiment, microRNA (miRNA) profiling of the target cells or tissues is conducted to determine the presence or absence of miRNA in the cells or tissues.

[0147] microRNAs (or miRNA) are 19-25 nucleotide long noncoding RNAs that bind to the 3′UTR of nucleic acid molecules and down-regulate gene expression either by reducing nucleic acid molecule stability or by inhibiting translation. The modified nucleic acids (mRNA), enhanced modified RNA or ribonucleic acids of the invention may comprise one or more microRNA target sequences, microRNA sequences, or microRNA seeds. Such sequences may correspond to any known microRNA such as those taught in US Publication US2005/0261218 and US Publication US2005/0059005, the contents of which are incorporated herein by reference in their entirety. As a non-limiting embodiment, known microRNAs, their sequences and seed sequences in human genome are listed below in Table 11.

[0148] A microRNA sequence comprises a “seed” region, i.e., a sequence in the region of positions 2-8 of the mature microRNA, which sequence has perfect Watson-Crick complementarity to the miRNA target sequence. A microRNA seed may comprise positions 2-8 or 2-7 of the mature microRNA. In some embodiments, a microRNA seed may comprise 7 nucleotides (e.g., nucleotides 2-8 of the mature microRNA), wherein the seed-complementary site in the corresponding miRNA target is flanked by an adenine (A) opposed to microRNA position 1. In some embodiments, a microRNA seed may comprise 6 nucleotides (e.g., nucleotides 2-7 of the mature microRNA), wherein the seed-complementary site in the corresponding miRNA target is flanked by an adenine (A) opposed to microRNA position 1. See for example, Grimson A, Farh K K, Johnston W K, Garrett-Engele P, Lim L P, Bartel D P; Mol Cell. 2007 Jul. 6; 27(1):91-105. The bases of the microRNA seed have complete complementarity with the target sequence. By engineering microRNA target sequences into the 3′UTR of nucleic acids or mRNA of the invention one can target the molecule for degradation or reduced translation, provided the microRNA in question is available. This process will reduce the hazard of off target effects upon nucleic acid molecule delivery. Identification of microRNA, microRNA target regions, and their expression patterns and role in biology have been reported (Bonauer et al., Curr Drug Targets 2010 11:943-949; Anand and Cheresh Curr Opin Hematol 2011 18:171-176; Contreras and Rao Leukemia 2012 26:404-413 (2011 Dec. 20. doi: 10.1038/leu.2011.356); Bartel Cell 2009 136:215-233; Landgraf et al, Cell, 2007 129:1401-1414; Gentner and Naldini, Tissue Antigens. 2012 80:393-403 and all references therein; each of which is herein incorporated by reference in its entirety).

[0149] For example, if the mRNA is not intended to be delivered to the liver but ends up there, then miR-122, a microRNA abundant in liver, can inhibit the expression of the gene of interest if one or multiple target sites of miR-122 are engineered into the 3′UTR of the modified nucleic acids, enhanced modified RNA or ribonucleic acids. Introduction of one or multiple binding sites for different microRNA can be engineered to further decrease the longevity, stability, and protein translation of a modified nucleic acids, enhanced modified RNA or ribonucleic acids. As used herein, the term “microRNA site” refers to a microRNA target site or a microRNA recognition site, or any nucleotide sequence to which a microRNA binds or associates. It should be understood that “binding” may follow traditional Watson-Crick hybridization rules or may reflect any stable association of the microRNA with the target sequence at or adjacent to the microRNA site.

[0150] Conversely, for the purposes of the modified nucleic acids, enhanced modified RNA or ribonucleic acids of the present invention, microRNA binding sites can be engineered out of (i.e. removed from) sequences in which they naturally occur in order to increase protein expression in specific tissues. For example, miR-122 binding sites may be removed to improve protein expression in the liver.

[0151] In one embodiment, the modified nucleic acids, enhanced modified RNA or ribonucleic acids of the present invention may include at least one miRNA-binding site in the 3′UTR in order to direct cytotoxic or cytoprotective mRNA therapeutics to specific cells such as, but not limited to, normal and/or cancerous cells (e.g., HEP3B or SNU449).

[0152] In another embodiment, the modified nucleic acids, enhanced modified RNA or ribonucleic acids of the present invention may include three miRNA-binding sites in the 3′UTR in order to direct cytotoxic or cytoprotective mRNA therapeutics to specific cells such as, but not limited to, normal and/or cancerous cells (e.g., HEP3B or SNU449).

[0153] Regulation of expression in multiple tissues can be accomplished through introduction or removal or one or several microRNA binding sites. Shown below in Table 12, microRNAs which are differentially expressed in different tissues and cells, and often associated with different types of diseases (e.g. cancer cells). The decision of removal or insertion of microRNA binding sites, or any combination, is dependent on microRNA expression patterns and their profilings in diseases.

[0154] Examples of tissues where microRNA are known to regulate mRNA, and thereby protein expression, include, but are not limited to, liver (miR-122), muscle (miR-133, miR-206, miR-208), endothelial cells (miR-17-92, miR-126), myeloid cells (miR-142-3p, miR-142-5p, miR-16, miR-21, miR-223, miR-24, miR-27), adipose tissue (let-7, miR-30c), heart (miR-1d, miR-149), kidney (miR-192, miR-194, miR-204), and lung epithelial cells (let-7, miR-133, miR-126).

[0155] Specifically, microRNAs are known to be differentially expressed in immune cells (also called hematopoietic cells), such as antigen presenting cells (APCs) (e.g. dendritic cells and macrophages), macrophages, monocytes, B lymphocytes, T lymphocytes, granuocytes, natural killer cells, etc. Immune cell specific microRNAs are involved in immunogenicity, autoimmunity, the immune-response to infection, inflammation, as well as unwanted immune response after gene therapy and tissue/organ transplantation. Immune cells specific microRNAs also regulate many aspects of development, proliferation, differentiation and apoptosis of hematopoietic cells (immune cells). For example, miR-142 and miR-146 are exclusively expressed in the immune cells, particularly abundant in myeloid dendritic cells. It was demonstrated in the art that the immune response to exogenous nucleic acid molecules was shut-off by adding miR-142 binding sites to the 3′UTR of the delivered gene construct, enabling more stable gene transfer in tissues and cells. miR-142 efficiently degrades the exogenous mRNA in antigen presenting cells and suppresses cytotoxic elimination of transduced cells (Annoni A et al., blood, 2009, 114, 5152-5161; Brown B D, et al., Nat med. 2006, 12(5), 585-591; Brown B D, et al., blood, 2007, 110(13): 4144-4152, each of which is herein incorporated by reference in its entirety).

[0156] An antigen-mediated immune response can refer to an immune response triggered by foreign antigens, which, when entering an organism, are processed by the antigen presenting cells and displayed on the surface of the antigen presenting cells. T cells can recognize the presented antigen and induce a cytotoxic elimination of cells that express the antigen.

[0157] Introducing the miR-142 binding site into the 3′-UTR of a polypeptide of the present invention can selectively repress the gene expression in the antigen presenting cells through miR-142 mediated mRNA degradation, limiting antigen presentation in APCs (e.g. dendritic cells) and thereby preventing antigen-mediated immune response after the delivery of the polynucleotides. The polynucleotides are therefore stably expressed in target tissues or cells without triggering cytotoxic elimination.

[0158] In one embodiment, microRNAs binding sites that are known to be expressed in immune cells, in particular, the antigen presenting cells, can be engineered into the polynucleotide to suppress the expression of the sensor-signal polynucleotide in APCs through microRNA mediated RNA degradation, subduing the antigen-mediated immune response, while the expression of the polynucleotide is maintained in non-immune cells where the immune cell specific microRNAs are not expressed. For example, to prevent the immunogenic reaction caused by a liver specific protein expression, the miR-122 binding site can be removed and the miR-142 (and/or mirR-146) binding sites can be engineered into the 3-UTR of the polynucleotide.

[0159] To further drive the selective degradation and suppression of mRNA in APCs and macrophage, the polynucleotide may include another negative regulatory element in the 3-UTR, either alone or in combination with mir-142 and/or mir-146 binding sites. As a non-limiting example, one regulatory element is the Constitutive Decay Elements (CDEs).

[0160] Immune cells specific microRNAs include, but are not limited to, hsa-let-7a-2-3p, hsa-let-7a-3p, hsa-7a-5p, hsa-let-7c, hsa-let-7e-3p, hsa-let-7e-5p, hsa-let-7g-3p, hsa-let-7g-5p, hsa-let-7i-3p, hsa-let-7i-5p, miR-10a-3p, miR-10a-5p, miR-1184, hsa-let-7f-1-3p, hsa-let-7f-2-5p, hsa-let-7f-5p, miR-125b-1-3p, miR-125b-2-3p, miR-125b-5p, miR-1279, miR-130a-3p, miR-130a-5p, miR-132-3p, miR-132-5p, miR-142-3p, miR-142-5p, miR-143-3p, miR-143-5p, miR-146a-3p, miR-146a-5p, miR-146b-3p, miR-146b-5p, miR-147a, miR-147b, miR-148a-5p, miR-148a-3p, miR-150-3p, miR-150-5p, miR-151b, miR-155-3p, miR-155-5p, miR-15a-3p, miR-15a-5p, miR-15b-5p, miR-15b-3p, miR-16-1-3p, miR-16-2-3p, miR-16-5p, miR-17-5p, miR-181a-3p, miR-181a-5p, miR-181a-2-3p, miR-182-3p, miR-182-5p, miR-197-3p, miR-197-5p, miR-21-5p, miR-21-3p, miR-214-3p, miR-214-5p, miR-223-3p, miR-223-5p, miR-221-3p, miR-221-5p, miR-23b-3p, miR-23b-5p, miR-24-1-5p, miR-24-2-5p, miR-24-3p, miR-26a-1-3p, miR-26a-2-3p, miR-26a-5p, miR-26b-3p, miR-26b-5p, miR-27a-3p, miR-27a-5p, miR-27b-3p, miR-27b-5p, miR-28-3p, miR-28-5p, miR-2909, miR-29a-3p, miR-29a-5p, miR-29b-1-5p, miR-29b-2-5p, miR-29c-3p, miR-29c-5p, miR-30e-3p, miR-30e-5p, miR-331-5p, miR-339-3p, miR-339-5p, miR-345-3p, miR-345-5p, miR-346, miR-34a-3p, miR-34a-5p, miR-363-3p, miR-363-5p, miR-372, miR-377-3p, miR-377-5p, miR-493-3p, miR-493-5p, miR-542, miR-548b-5p, miR548c-5p, miR-548i, miR-548j, miR-548n, miR-574-3p, miR-598, miR-718, miR-935, miR-99a-3p, miR-99a-5p, miR-99b-3p and miR-99b-5p. microRNAs that are enriched in specific types of immune cells are listed in Table 13. Furthermore, novel miroRNAs are discovered in the immune cells in the art through micro-array hybridization and microtome analysis (Jima D D et al, Blood, 2010, 116:e118-e127; Vaz C et al., BMC Genomics, 2010, 11,288, the content of each of which is incorporated herein by reference in its entirety.)

[0161] MicroRNAs that are known to be expressed in the liver include, but are not limited to, miR-107, miR-122-3p, miR-122-5p, miR-1228-3p, miR-1228-5p, miR-1249, miR-129-5p, miR-1303, miR-151a-3p, miR-151a-5p, miR-152, miR-194-3p, miR-194-5p, miR-199a-3p, miR-199a-5p, miR-199b-3p, miR-199b-5p, miR-296-5p, miR-557, miR-581, miR-939-3p, miR-939-5p. MicroRNA binding sites from any liver specific microRNA can be introduced to or removed from the polynucleotides to regulate the expression of the polynucleotides in the liver. Liver specific microRNAs binding sites can be engineered alone or further in combination with immune cells (e.g. APCs) microRNA binding sites in order to prevent immune reaction against protein expression in the liver.

[0162] MicroRNAs that are known to be expressed in the lung include, but are not limited to, let-7a-2-3p, let-7a-3p, let-7a-5p, miR-126-3p, miR-126-5p, miR-127-3p, miR-127-5p, miR-130a-3p, miR-130a-5p, miR-130b-3p, miR-130b-5p, miR-133a, miR-133b, miR-134, miR-18a-3p, miR-18a-5p, miR-18b-3p, miR-18b-5p, miR-24-1-5p, miR-24-2-5p, miR-24-3p, miR-296-3p, miR-296-5p, miR-32-3p, miR-337-3p, miR-337-5p, miR-381-3p, miR-381-5p. MicroRNA binding sites from any lung specific microRNA can be introduced to or removed from the polynucleotide to regulate the expression of the polynucleotide in the lung. Lung specific microRNAs binding sites can be engineered alone or further in combination with immune cells (e.g. APCs) microRNA binding sites in order to prevent an immune reaction against protein expression in the lung.

[0163] MicroRNAs that are known to be expressed in the heart include, but are not limited to, miR-1, miR-133a, miR-133b, miR-149-3p, miR-149-5p, miR-186-3p, miR-186-5p, miR-208a, miR-208b, miR-210, miR-296-3p, miR-320, miR-451a, miR-451b, miR-499a-3p, miR-499a-5p, miR-499b-3p, miR-499b-5p, miR-744-3p, miR-744-5p, miR-92b-3p and miR-92b-5p. MicroRNA binding sites from any heart specific microRNA can be introduced to or removed from the polynucleotides to regulate the expression of the polynucleotides in the heart. Heart specific microRNAs binding sites can be engineered alone or further in combination with immune cells (e.g. APCs) microRNA binding sites to prevent an immune reaction against protein expression in the heart.

[0164] MicroRNAs that are known to be expressed in the nervous system include, but are not limited to, miR-124-5p, miR-125a-3p, miR-125a-5p, miR-125b-1-3p, miR-125b-2-3p, miR-125b-5p, miR-1271-3p, miR-1271-5p, miR-128, miR-132-5p, miR-135a-3p, miR-135a-5p, miR-135b-3p, miR-135b-5p, miR-137, miR-139-5p, miR-139-3p, miR-149-3p, miR-149-5p, miR-153, miR-181c-3p, miR-181c-5p, miR-183-3p, miR-183-5p, miR-190a, miR-190b, miR-212-3p, miR-212-5p, miR-219-1-3p, miR-219-2-3p, miR-23a-3p, miR-23a-5p, miR-30a-5p, miR-30b-3p, miR-30b-5p, miR-30c-1-3p, miR-30c-2-3p, miR-30c-5p, miR-30d-3p, miR-30d-5p, miR-329, miR-342-3p, miR-3665, miR-3666, miR-380-3p, miR-380-5p, miR-383, miR-410, miR-425-3p, miR-425-5p, miR-454-3p, miR-454-5p, miR-483, miR-510, miR-516a-3p, miR-548b-5p, miR-548c-5p, miR-571, miR-7-1-3p, miR-7-2-3p, miR-7-5p, miR-802, miR-922, miR-9-3p and miR-9-5p. MicroRNAs enriched in the nervous system further include those specifically expressed in neurons, including, but not limited to, miR-132-3p, miR-132-3p, miR-148b-3p, miR-148b-5p, miR-151a-3p, miR-151a-5p, miR-212-3p, miR-212-5p, miR-320b, miR-320e, miR-323a-3p, miR-323a-5p, miR-324-5p, miR-325, miR-326, miR-328, miR-922 and those specifically expressed in glial cells, including, but not limited to, miR-1250, miR-219-1-3p, miR-219-2-3p, miR-219-5p, miR-23a-3p, miR-23a-5p, miR-3065-3p, miR-3065-5p, miR-30e-3p, miR-30e-5p, miR-32-5p, miR-338-5p, miR-657. MicroRNA binding sites from any CNS specific microRNA can be introduced to or removed from the polynucleotides to regulate the expression of the polynucleotide in the nervous system. Nervous system specific microRNAs binding sites can be engineered alone or further in combination with immune cells (e.g. APCs) microRNA binding sites in order to prevent immune reaction against protein expression in the nervous system.

[0165] MicroRNAs that are known to be expressed in the pancreas include, but are not limited to, miR-105-3p, miR-105-5p, miR-184, miR-195-3p, miR-195-5p, miR-196a-3p, miR-196a-5p, miR-214-3p, miR-214-5p, miR-216a-3p, miR-216a-5p, miR-30a-3p, miR-33a-3p, miR-33a-5p, miR-375, miR-7-1-3p, miR-7-2-3p, miR-493-3p, miR-493-5p and miR-944. MicroRNA binding sites from any pancreas specific microRNA can be introduced to or removed from the polynucleotide to regulate the expression of the polynucleotide in the pancreas. Pancreas specific microRNAs binding sites can be engineered alone or further in combination with immune cells (e.g. APCs) microRNA binding sites in order to prevent an immune reaction against protein expression in the pancreas.

[0166] MicroRNAs that are known to be expressed in the kidney further include, but are not limited to, miR-122-3p, miR-145-5p, miR-17-5p, miR-192-3p, miR-192-5p, miR-194-3p, miR-194-5p, miR-20a-3p, miR-20a-5p, miR-204-3p, miR-204-5p, miR-210, miR-216a-3p, miR-216a-5p, miR-296-3p, miR-30a-3p, miR-30a-5p, miR-30b-3p, miR-30b-5p, miR-30c-1-3p, miR-30c-2-3p, miR30c-5p, miR-324-3p, miR-335-3p, miR-335-5p, miR-363-3p, miR-363-5p and miR-562. MicroRNA binding sites from any kidney specific microRNA can be introduced to or removed from the polynucleotide to regulate the expression of the polynucleotide in the kidney. Kidney specific microRNAs binding sites can be engineered alone or further in combination with immune cells (e.g. APCs) microRNA binding sites to prevent an immune reaction against protein expression in the kidney.

[0167] MicroRNAs that are known to be expressed in the muscle further include, but are not limited to, let-7g-3p, let-7g-5p, miR-1, miR-1286, miR-133a, miR-133b, miR-140-3p, miR-143-3p, miR-143-5p, miR-145-3p, miR-145-5p, miR-188-3p, miR-188-5p, miR-206, miR-208a, miR-208b, miR-25-3p and miR-25-5p. MicroRNA binding sites from any muscle specific microRNA can be introduced to or removed from the polynucleotide to regulate the expression of the polynucleotide in the muscle. Muscle specific microRNAs binding sites can be engineered alone or further in combination with immune cells (e.g. APCs) microRNA binding sites to prevent an immune reaction against protein expression in the muscle.

[0168] MicroRNAs are differentially expressed in different types of cells, such as endothelial cells, epithelial cells and adipocytes. For example, microRNAs that are expressed in endothelial cells include, but are not limited to, let-7b-3p, let-7b-5p, miR-100-3p, miR-100-5p, miR-101-3p, miR-101-5p, miR-126-3p, miR-126-5p, miR-1236-3p, miR-1236-5p, miR-130a-3p, miR-130a-5p, miR-17-5p, miR-17-3p, miR-18a-3p, miR-18a-5p, miR-19a-3p, miR-19a-5p, miR-19b-1-5p, miR-19b-2-5p, miR-19b-3p, miR-20a-3p, miR-20a-5p, miR-217, miR-210, miR-21-3p, miR-21-5p, miR-221-3p, miR-221-5p, miR-222-3p, miR-222-5p, miR-23a-3p, miR-23a-5p, miR-296-5p, miR-361-3p, miR-361-5p, miR-421, miR-424-3p, miR-424-5p, miR-513a-5p, miR-92a-1-5p, miR-92a-2-5p, miR-92a-3p, miR-92b-3p and miR-92b-5p. Many novel microRNAs are discovered in endothelial cells from deep-sequencing analysis (Voellenkle C et al., RNA, 2012, 18, 472-484, herein incorporated by reference in its entirety) microRNA binding sites from any endothelial cell specific microRNA can be introduced to or removed from the polynucleotide to modulate the expression of the polynucleotide in the endothelial cells in various conditions.

[0169] For further example, microRNAs that are expressed in epithelial cells include, but are not limited to, let-7b-3p, let-7b-5p, miR-1246, miR-200a-3p, miR-200a-5p, miR-200b-3p, miR-200b-5p, miR-200c-3p, miR-200c-5p, miR-338-3p, miR-429, miR-451a, miR-451b, miR-494, miR-802 and miR-34a, miR-34b-5p, miR-34c-5p, miR-449a, miR-449b-3p, miR-449b-5p specific in respiratory ciliated epithelial cells; let-7 family, miR-133a, miR-133b, miR-126 specific in lung epithelial cells; miR-382-3p, miR-382-5p specific in renal epithelial cells and miR-762 specific in corneal epithelial cells. MicroRNA binding sites from any epithelial cell specific MicroRNA can be introduced to or removed from the polynucleotide to modulate the expression of the polynucleotide in the epithelial cells in various conditions.

[0170] In addition, a large group of microRNAs are enriched in embryonic stem cells, controlling stem cell self-renewal as well as the development and/or differentiation of various cell lineages, such as neural cells, cardiac, hematopoietic cells, skin cells, osteogenic cells and muscle cells (Kuppusamy K T et al., Curr. Mol Med, 2013, 13(5), 757-764; Vidigal J A and Ventura A, Semin Cancer Biol. 2012, 22(5-6), 428-436; Goff L A et al., PLoS One, 2009, 4:e7192; Morin R D et al., Genome Res, 2008, 18, 610-621; Yoo J K et al., Stem Cells Dev. 2012, 21(11), 2049-2057, each of which is herein incorporated by reference in its entirety). MicroRNAs abundant in embryonic stem cells include, but are not limited to, let-7a-2-3p, let-a-3p, let-7a-5p, let7d-3p, let-7d-5p, miR-103a-2-3p, miR-103a-5p, miR-106b-3p, miR-106b-5p, miR-1246, miR-1275, miR-138-1-3p, miR-138-2-3p, miR-138-5p, miR-154-3p, miR-154-5p, miR-200c-3p, miR-200c-5p, miR-290, miR-301a-3p, miR-301a-5p, miR-302a-3p, miR-302a-5p, miR-302b-3p, miR-302b-5p, miR-302c-3p, miR-302c-5p, miR-302d-3p, miR-302d-5p, miR-302e, miR-367-3p, miR-367-5p, miR-369-3p, miR-369-5p, miR-370, miR-371, miR-373, miR-380-5p, miR-423-3p, miR-423-5p, miR-486-5p, miR-520c-3p, miR-548e, miR-548f, miR-548g-3p, miR-548g-5p, miR-548i, miR-548k, miR-548l, miR-548m, miR-548n, miR-548o-3p, miR-548o-5p, miR-548p, miR-664a-3p, miR-664a-5p, miR-664b-3p, miR-664b-5p, miR-766-3p, miR-766-5p, miR-885-3p, miR-885-5p, miR-93-3p, miR-93-5p, miR-941,miR-96-3p, miR-96-5p, miR-99b-3p and miR-99b-5p. Many predicted novel microRNAs are discovered by deep sequencing in human embryonic stem cells (Morin R D et al., Genome Res, 2008, 18, 610-621; Goff L A et al., PLoS One, 2009, 4:e7192; Bar M et al., Stem cells, 2008, 26, 2496-2505, the content of each of which is incorporated herein by references in its entirety).

[0171] In one embodiment, the binding sites of embryonic stem cell specific microRNAs can be included in or removed from the 3-UTR of the polynucleotide to modulate the development and/or differentiation of embryonic stem cells, to inhibit the senescence of stem cells in a degenerative condition (e.g. degenerative diseases), or to stimulate the senescence and apoptosis of stem cells in a disease condition (e.g. cancer stem cells).

[0172] Many microRNA expression studies are conducted in the art to profile the differential expression of microRNAs in various cancer cells/tissues and other diseases. Some microRNAs are abnormally over-expressed in certain cancer cells and others are under-expressed. For example, microRNAs are differentially expressed in cancer cells (WO2008/154098, US2013/0059015, US2013/0042333, WO2011/157294); cancer stem cells (US2012/0053224); pancreatic cancers and diseases (US2009/0131348, US2011/0171646, US2010/0286232, U.S. Pat. No. 8,389,210); asthma and inflammation (U.S. Pat. No. 8,415,096); prostate cancer (US2013/0053264); hepatocellular carcinoma (WO2012/151212, US2012/0329672, WO2008/054828, U.S. Pat. No. 8,252,538); lung cancer cells (WO2011/076143, WO2013/033640, WO2009/070653, US2010/0323357); cutaneous T cell lymphoma (WO2013/011378); colorectal cancer cells (WO2011/0281756, WO2011/076142); cancer positive lympho nodes (WO2009/100430, US2009/0263803); nasopharyngeal carcinoma (EP2112235); chronic obstructive pulmonary disease (US2012/0264626, US2013/0053263); thyroid cancer (WO2013/066678); ovarian cancer cells (US2012/0309645, WO2011/095623); breast cancer cells (WO2008/154098, WO2007/081740, US2012/0214699), leukemia and lymphoma (WO2008/073915, US2009/0092974, US2012/0316081, US2012/0283310, WO2010/018563, the content of each of which is incorporated herein by reference in their entirety.)

[0173] As a non-limiting example, microRNA sites that are over-expressed in certain cancer and/or tumor cells can be removed from the 3-UTR of the polynucleotide encoding the polypeptide of interest, restoring the expression suppressed by the over-expressed microRNAs in cancer cells, thus ameliorating the corresponsive biological function, for instance, transcription stimulation and/or repression, cell cycle arrest, apoptosis and cell death. Normal cells and tissues, wherein microRNAs expression is not up-regulated, will remain unaffected.

[0174] MicroRNA can also regulate complex biological processes such as angiogenesis (miR-132) (Anand and Cheresh Curr Opin Hematol 2011 18:171-176). In the modified nucleic acids, enhanced modified RNA or ribonucleic acids of the invention, binding sites for microRNAs that are involved in such processes may be removed or introduced, in order to tailor the expression of the modified nucleic acids, enhanced modified RNA or ribonucleic acids expression to biologically relevant cell types or to the context of relevant biological processes. In this context, the mRNA are defined as auxotrophic mRNA.

[0175] MicroRNA gene regulation may be influenced by the sequence surrounding the microRNA such as, but not limited to, the species of the surrounding sequence, the type of sequence (e.g., heterologous, homologous and artificial), regulatory elements in the surrounding sequence and/or structural elements in the surrounding sequence. The microRNA may be influenced by the 5′UTR and/or the 3′UTR. As a non-limiting example, a non-human 3′UTR may increase the regulatory effect of the microRNA sequence on the expression of a polypeptide of interest compared to a human 3′UTR of the same sequence type.

[0176] In one embodiment, other regulatory elements and/or structural elements of the 5′-UTR can influence microRNA mediated gene regulation. One example of a regulatory element and/or structural element is a structured IRES (Internal Ribosome Entry Site) in the 5′UTR, which is necessary for the binding of translational elongation factors to initiate protein translation. EIF4A2 binding to this secondarily structured element in the 5′UTR is necessary for microRNA mediated gene expression (Meijer H A et al., Science, 2013, 340, 82-85, herein incorporated by reference in its entirety). The modified nucleic acids, enhanced modified RNA or ribonucleic acids of the invention can further be modified to include this structured 5′-UTR in order to enhance microRNA mediated gene regulation.

[0177] At least one microRNA site can be engineered into the 3′ UTR of the modified nucleic acids, enhanced modified RNA or ribonucleic acids of the present invention. In this context, at least two, at least three, at least four, at least five, at least six, at least seven, at least eight, at least nine, at least ten or more microRNA sites may be engineered into the 3′ UTR of the ribonucleic acids of the present invention. In one embodiment, the microRNA sites incorporated into the modified nucleic acids, enhanced modified RNA or ribonucleic acids may be the same or may be different microRNA sites. In another embodiment, the microRNA sites incorporated into the modified nucleic acids, enhanced modified RNA or ribonucleic acids may target the same or different tissues in the body. As a non-limiting example, through the introduction of tissue-, cell-type-, or disease-specific microRNA binding sites in the 3′ UTR of a modified nucleic acid mRNA, the degree of expression in specific cell types (e.g. hepatocytes, myeloid cells, endothelial cells, cancer cells, etc.) can be reduced.

[0178] In one embodiment, a microRNA site can be engineered near the 5′ terminus of the 3′UTR, about halfway between the 5′ terminus and 3′terminus of the 3′UTR and/or near the 3′terminus of the 3′UTR. As a non-limiting example, a microRNA site may be engineered near the 5′ terminus of the 3′UTR and about halfway between the 5′ terminus and 3′terminus of the 3′UTR. As another non-limiting example, a microRNA site may be engineered near the 3′terminus of the 3′UTR and about halfway between the 5′ terminus and 3′terminus of the 3′UTR. As yet another non-limiting example, a microRNA site may be engineered near the 5′ terminus of the 3′UTR and near the 3′ terminus of the 3′UTR.

[0179] In another embodiment, a 3′UTR can comprise 4 microRNA sites. The microRNA sites may be complete microRNA binding sites, microRNA seed sequences and/or microRNA binding site sequences without the seed sequence.

[0180] In one embodiment, a nucleic acid of the invention may be engineered to include at least one microRNA in order to dampen the antigen presentation by antigen presenting cells. The microRNA may be the complete microRNA sequence, the microRNA seed sequence, the microRNA sequence without the seed or a combination thereof. As a non-limiting example, the microRNA incorporated into the nucleic acid may be specific to the hematopoietic system. As another non-limiting example, the microRNA incorporated into the nucleic acid of the invention to dampen antigen presentation is miR-142-3p.

[0181] In one embodiment, a nucleic acid may be engineered to include microRNA sites which are expressed in different tissues of a subject. As a non-limiting example, a modified nucleic acid, enhanced modified RNA or ribonucleic acid of the present invention may be engineered to include miR-192 and miR-122 to regulate expression of the modified nucleic acid, enhanced modified RNA or ribonucleic acid in the liver and kidneys of a subject. In another embodiment, a modified nucleic acid, enhanced modified RNA or ribonucleic acid may be engineered to include more than one microRNA sites for the same tissue. For example, a modified nucleic acid, enhanced modified RNA or ribonucleic acid of the present invention may be engineered to include miR-17-92 and miR-126 to regulate expression of the modified nucleic acid, enhanced modified RNA or ribonucleic acid in endothelial cells of a subject.

[0182] In one embodiment, the therapeutic window and or differential expression associated with the target polypeptide encoded by the modified nucleic acid, enhanced modified RNA or ribonucleic acid encoding a signal (also referred to herein as a polynucleotide) of the invention may be altered. For example, polynucleotides may be designed whereby a death signal is more highly expressed in cancer cells (or a survival signal in a normal cell) by virtue of the miRNA signature of those cells. Where a cancer cell expresses a lower level of a particular miRNA, the polynucleotide encoding the binding site for that miRNA (or miRNAs) would be more highly expressed. Hence, the target polypeptide encoded by the polynucleotide is selected as a protein which triggers or induces cell death. Neighboring noncancer cells, harboring a higher expression of the same miRNA would be less affected by the encoded death signal as the polynucleotide would be expressed at a lower level due to the affects of the miRNA binding to the binding site or “sensor” encoded in the 3′UTR. Conversely, cell survival or cytoprotective signals may be delivered to tissues containing cancer and non cancerous cells where a miRNA has a higher expression in the cancer cells—the result being a lower survival signal to the cancer cell and a larger survival signature to the normal cell. Multiple polynucleotides may be designed and administered having different signals according to the previous paradigm.

[0183] In one embodiment, the expression of a nucleic acid may be controlled by incorporating at least one sensor sequence in the nucleic acid and formulating the nucleic acid. As a non-limiting example, a nucleic acid may be targeted to an orthotopic tumor by having a nucleic acid incorporating a miR-122 binding site and formulated in a lipid nanoparticle comprising the cationic lipid DLin-KC2-DMA (see e.g., the experiments described in Example 49A and 49B).

[0184] According to the present invention, the polynucleotides may be modified as to avoid the deficiencies of other polypeptide-encoding molecules of the art. Hence, in this embodiment the polynucleotides are referred to as modified polynucleotides.

[0185] Through an understanding of the expression patterns of microRNA in different cell types, modified nucleic acids, enhanced modified RNA or ribonucleic acids such as polynucleotides can be engineered for more targeted expression in specific cell types or only under specific biological conditions. Through introduction of tissue-specific microRNA binding sites, modified nucleic acids, enhanced modified RNA or ribonucleic acids, could be designed that would be optimal for protein expression in a tissue or in the context of a biological condition.

[0186] Transfection experiments can be conducted in relevant cell lines, using engineered modified nucleic acids, enhanced modified RNA or ribonucleic acids and protein production can be assayed at various time points post-transfection. For example, cells can be transfected with different microRNA binding site-engineering nucleic acids or mRNA and by using an ELISA kit to the relevant protein and assaying protein produced at 6 hr, 12 hr, 24 hr, 48 hr, 72 hr and 7 days post-transfection. In vivo experiments can also be conducted using microRNA-binding site-engineered molecules to examine changes in tissue-specific expression of formulated modified nucleic acids, enhanced modified RNA or ribonucleic acids.

[0187] Non-limiting examples of cell lines which may be useful in these investigations include those from ATCC (Manassas, VA) including MRC-5, A549, T84, NCI-H2126 [H2126], NCI-H1688 [H1688], WI-38, WI-38 VA-13 subline 2RA. WI-26 VA4, C3A [HepG2/C3A, derivative of Hep G2 (ATCC HB-8065)], THLE-3, H69AR, NCI-H292 [H292], CFPAC-1, NTERA-2 cl.D1 [NT2/D1], DMS 79, DMS 53, DMS 153, DMS 114, MSTO-211H, SW 1573 [SW-1573, SW1573], SW 1271 [SW-1271, SW1271], SHP-77, SNU-398. SNU-449, SNU-182, SNU-475, SNU-387, SNU-423, NL20, NL20-TA [NL20T-A], THLE-2, HBE135-E6E7, HCC827, HCC4006, NCI-H23 [H23]. NCI-H1299, NCI-H187 [H187], NCI-H358 [H-358, H358], NCI-H378 [H378], NCI-H522 [H522], NCI-H526 [H526], NCI-H727 [H727], NCI-H810 [H810], NCI-H889 [H889], NCI-H1155 [H1155], NCI-H1404 [H1404], NCI-N87 [N87], NCI-H196 [H196], NCI-H211 [H211], NCI-H220 [H220], NCI-H250 [H250], NCI-H524 [H524], NCI-H647 [H647], NCI-H650 [H650], NCI-H711 [H711], NCI-H719 [H719], NCI-H740 [H740], NCI-H748 [H748], NCI-H774 [H774], NCI-H838 [H838], NCI-H841 [H841], NCI-H847 [H847], NCI-H865 [H865], NCI-H920 [H920], NCI-H1048 [H1048], NCI-H1092 [H1092], NCI-H1105 [H1105], NCI-H1184 [H1184], NCI-H1238 [H1238], NCI-H1341 [H1341], NCI-H1385 [H1385], NCI-H1417 [H1417], NCI-H1435 [H1435], NCI-H1436 [H1436], NCI-H1437 [H1437], NCI-H1522 [H1522], NCI-H1563 [H1563], NCI-H1568 [H1568], NCI-H1573 [H1573], NCI-H1581 [H1581], NCI-H1618 [H1618], NCI-H1623 [H1623], NCI-H1650 [H-1650, H1650], NCI-H1651 [H1651], NCI-H1666 [H-1666, H1666], NCI-H1672 [H1672], NCI-H1693 [H1693], NCI-H1694 [H1694], NCI-H1703 [H1703], NCI-H1734 [H-1734, H1734], NCI-H1755 [H1755], NCI-H1755 [H1755], NCI-H1770 [H1770], NCI-H1793 [H1793], NCI-H1836 [H1836], NCI-H1838 [H1838], NCI-H1869 [H1869], NCI-H1876 [H1876], NCI-H1882 [H1882], NCI-H1915 [H1915], NCI-H1930 [H1930], NCI-H1944 [H1944]. NCI-H1975 [H-1975, H1975], NCI-H1993 [H1993], NCI-H2023 [H2023], NCI-H2029 [H2029], NCI-H2030 [H2030], NCI-H2066 [H2066], NCI-H2073 [H2073], NCI-H2081 [H2081], NCI-H2085 [H2085], NCI-H2087 [H2087], NCI-H2106 [H2106], NCI-H2110 [H2110], NCI-H2135 [H2135], NCI-H2141 [H2141], NCI-H2171 [H2171], NCI-H2172 [H2172], NCI-H2195 [H2195], NCI-H2196 [H2196]. NCI-H2198 [H2198], NCI-H2227 [H2227], NCI-H2228 [H2228], NCI-H2286 [H2286], NCI-H2291 [H2291], NCI-H2330 [H2330], NCI-H2342 [H2342], NCI-H2347 [H2347], NCI-H2405 [H2405], NCI-H2444 [H2444], UMC-11, NCI-H64 [H64], NCI-H735 [H735], NCI-H735 [H735], NCI-H1963 [H1963], NCI-H2107 [H2107], NCI-H2108 [H2108], NCI-H2122 [H2122], Hs 573.T, Hs 573.Lu, PLC/PRF/5, BEAS-2B, Hep G2, Tera-1, Tera-2, NCI-H69 [H69], NCI-H128 [H128], ChaGo-K-1, NCI-H446 [H446], NCI-H209 [H209], NCI-H146 [H146], NCI-H441 [H441], NCI-H82 [H82], NCI-H460 [H460], NCI-H596 [H596], NCI-H676B [H676B], NCI-H345 [H345], NCI-H820 [H820], NCI-H520 [H520], NCI-H661 [H661], NCI-H510A [H510A, NCI-H510], SK-HEP-1, A-427, Calu-1, Calu-3, Calu-6, SK-LU-1, SK-MES-1, SW 900 [SW-900, SW900]. Malme-3M, and Capan-1.

[0188] In some embodiments, modified messenger RNA can be designed to incorporate microRNA binding region sites that either have 100% identity to known seed sequences or have less than 100% identity to seed sequences. The seed sequence can be partially mutated to decrease microRNA binding affinity and as such result in reduced downmodulation of that mRNA transcript. In essence, the degree of match or mis-match between the target mRNA and the microRNA seed can act as a rheostat to more finely tune the ability of the microRNA to modulate protein expression. In addition, mutation in the non-seed region of a microRNA binding site may also impact the ability of a microRNA to modulate protein expression.

[0189] In one embodiment, a miR sequence may be incorporated into the loop of a stem loop.

[0190] In another embodiment, a miR seed sequence may be incorporated in the loop of a stem loop and a miR binding site may be incorporated into the 5′ or 3′ stem of the stem loop.

[0191] In one embodiment, a TEE may be incorporated on the 5′end of the stem of a stem loop and a miR seed may be incorporated into the stem of the stem loop. In another embodiment, a TEE may be incorporated on the 5′end of the stem of a stem loop, a miR seed may be incorporated into the stem of the stem loop and a miR binding site may be incorporated into the 3′end of the stem or the sequence after the stem loop. The miR seed and the miR binding site may be for the same and/or different miR sequences.

[0192] In one embodiment, the incorporation of a miR sequence and/or a TEE sequence changes the shape of the stem loop region which may increase and/or decrease translation. (see e.g, Kedde et al. A Pumilio-induced RNA structure switch in p27-3′UTR controls miR-221 and miR-22 accessibility. Nature Cell Biology. 2010, herein incorporated by reference in its entirety).

[0193] In one embodiment, the incorporation of a miR sequence and/or a TEE sequence changes the shape of the stem loop region which may increase and/or decrease translation. (see e.g, Kedde et al. A Pumilio-induced RNA structure switch in p27-3′UTR controls miR-221 and miR-22 accessibility. Nature Cell Biology. 2010, herein incorporated by reference in its entirety).

[0194] In one embodiment, the 5′UTR may comprise at least one microRNA sequence. The microRNA sequence may be, but is not limited to, a 19 or 22 nucleotide sequence and/or a microRNA sequence without the seed.

[0195] In one embodiment the microRNA sequence in the 5′UTR may be used to stabilize the nucleic acid and/or mRNA described herein.

[0196] In another embodiment, a microRNA sequence in the 5′UTR may be used to decrease the accessibility of the site of translation initiation such as, but not limited to a start codon. Matsuda et al (PLoS One. 2010 11(5):e15057; herein incorporated by reference in its entirety) used antisense locked nucleic acid (LNA) oligonucleotides and exon-junctino complexes (EJCs) around a start codon (−4 to +37 where the A of the AUG codons is +1) in order to decrease the accessibility to the first start codon (AUG). Matsuda showed that altering the sequence around the start codon with an LNA or EJC the efficiency, length and structural stability of the nucleic acid or mRNA is affected. The nucleic acids or mRNA of the present invention may comprise a microRNA sequence, instead of the LNA or EJC sequence described by Matsuda et al, near the site of translation initiation in order to decrease the accessibility to the site of translation initiation. The site of translation initiation may be prior to, after or within the microRNA sequence. As a non-limiting example, the site of translation initiation may be located within a microRNA sequence such as a seed sequence or binding site. As another non-limiting example, the site of translation initiation may be located within a miR-122 sequence such as the seed sequence or the mir-122 binding site.

[0197] In one embodiment, the nucleic acids or mRNA of the present invention may include at least one microRNA in order to dampen the antigen presentation by antigen presenting cells. The microRNA may be the complete microRNA sequence, the microRNA seed sequence, the microRNA sequence without the seed or a combination thereof. As a non-limiting example, the microRNA incorporated into the nucleic acids or mRNA of the present invention may be specific to the hematopoietic system. As another non-limiting example, the microRNA incorporated into the nucleic acids or mRNA of the present invention to dampen antigen presentation is miR-142-3p.

[0198] In one embodiment, the nucleic acids or mRNA of the present invention may include at least one microRNA in order to dampen expression of the encoded polypeptide in a cell of interest. As a non-limiting example, the nucleic acids or mRNA of the present invention may include at least one miR-122 binding site in order to dampen expression of an encoded polypeptide of interest in the liver. As another non-limiting example, the nucleic acids or mRNA of the present invention may include at least one miR-142-3p binding site, miR-142-3p seed sequence, miR-142-3p binding site without the seed, miR-142-5p binding site, miR-142-5p seed sequence, miR-142-5p binding site without the seed, miR-146 binding site, miR-146 seed sequence and/or miR-146 binding site without the seed sequence (see e.g., the experiment outlined in Example 24, 25, 26, 26, 36 and 48).

[0199] In one embodiment, the nucleic acids or mRNA of the present invention may comprise at least one microRNA binding site in the 3′UTR in order to selectively degrade mRNA therapeutics in the immune cells to subdue unwanted immunogenic reactions caused by therapeutic delivery. As a non-limiting example, the microRNA binding site may be the modified nucleic acids more unstable in antigen presenting cells. Non-limiting examples of these microRNA include mir-142-5p, mir-142-3p, mir-146a-5p and mir-146-3p.

[0200] In one embodiment, the nucleic acids or mRNA of the present invention comprises at least one microRNA sequence in a region of the nucleic acid or mRNA which may interact with a RNA binding protein.

### RNA Motifs for RNA Binding Proteins (RBPs)

[0201] RNA binding proteins (RBPs) can regulate numerous aspects of co- and post-transcription gene expression such as, but not limited to, RNA splicing, localization, translation, turnover, polyadenylation, capping, modification, export and localization. RNA-binding domains (RBDs), such as, but not limited to, RNA recognition motif (RR) and hnRNP K-homology (KH) domains, typically regulate the sequence association between RBPs and their RNA targets (Ray et al. Nature 2013. 499:172-177; herein incorporated by reference in its entirety). In one embodiment, the canonical RBDs can bind short RNA sequences. In another embodiment, the canonical RBDs can recognize structure RNAs.

[0202] Non limiting examples of RNA binding proteins and related nucleic acid and protein sequences are shown in Table 26 in Example 23.

[0203] In one embodiment, to increase the stability of the mRNA of interest, an mRNA encoding HuR can be co-transfected or co-injected along with the mRNA of interest into the cells or into the tissue. These proteins can also be tethered to the mRNA of interest in vitro and then administered to the cells together. Poly A tail binding protein, PABP interacts with eukaryotic translation initiation factor eIF4G to stimulate translational initiation. Co-administration of mRNAs encoding these RBPs along with the mRNA drug and/or tethering these proteins to the mRNA drug in vitro and administering the protein-bound mRNA into the cells can increase the translational efficiency of the mRNA. The same concept can be extended to co-administration of mRNA along with mRNAs encoding various translation factors and facilitators as well as with the proteins themselves to influence RNA stability and/or translational efficiency.

[0204] In one embodiment, the nucleic acids and/or mRNA may comprise at least one RNA-binding motif such as, but not limited to a RNA-binding domain (RBD).

[0205] In one embodiment, the RBD may be any of the RBDs, fragments or variants thereof descried by Ray et al. (Nature 2013. 499:172-177; herein incorporated by reference in its entirety).

[0206] In one embodiment, the nucleic acids or mRNA of the present invention may comprise a sequence for at least one RNA-binding domain (RBDs). When the nucleic acids or mRNA of the present invention comprise more than one RBD, the RBDs do not need to be from the same species or even the same structural class.

[0207] In one embodiment, at least one flanking region (e.g., the 5′UTR and/or the 3′UTR) may comprise at least one RBD. In another embodiment, the first flanking region and the second flanking region may both comprise at least one RBD. The RBD may be the same or each of the RBDs may have at least 60% sequence identity to the other RBD. As a non-limiting example, at least on RBD may be located before, after and/or within the 3′UTR of the nucleic acid or mRNA of the present invention. As another non-limiting example, at least one RBD may be located before or within the first 300 nucleosides of the 3′UTR.

[0208] In another embodiment, the nucleic acids and/or mRNA of the present invention may comprise at least one RBD in the first region of linked nucleosides. The RBD may be located before, after or within a coding region (e.g., the ORF).

[0209] In yet another embodiment, the first region of linked nucleosides and/or at least one flanking region may comprise at least on RBD. As a non-limiting example, the first region of linked nucleosides may comprise a RBD related to splicing factors and at least one flanking region may comprise a RBD for stability and/or translation factors.

[0210] In one embodiment, the nucleic acids and/or mRNA of the present invention may comprise at least one RBD located in a coding and/or non-coding region of the nucleic acids and/or mRNA.

[0211] In one embodiment, at least one RBD may be incorporated into at least one flanking region to increase the stability of the nucleic acid and/or mRNA of the present invention.

[0212] In one embodiment, a microRNA sequence in a RNA binding protein motif may be used to decrease the accessibility of the site of translation initiation such as, but not limited to a start codon. The nucleic acids or mRNA of the present invention may comprise a microRNA sequence, instead of the LNA or EJC sequence described by Matsuda et al, near the site of translation initiation in order to decrease the accessibility to the site of translation initiation. The site of translation initiation may be prior to, after or within the microRNA sequence. As a non-limiting example, the site of translation initiation may be located within a microRNA sequence such as a seed sequence or binding site. As another non-limiting example, the site of translation initiation may be located within a miR-122 sequence such as the seed sequence or the mir-122 binding site.

[0213] In another embodiment, an antisense locked nucleic acid (LNA) oligonucleotides and exon-junctino complexes (EJCs) may be used in the RNA binding protein motif. The LNA and EJCs may be used around a start codon (−4 to +37 where the A of the AUG codons is +1) in order to decrease the accessibility to the first start codon (AUG).

### Other Regulatory Elements in 3′UTR

[0214] In addition to microRNA binding sites, other regulatory sequences in the 3′-UTR of natural mRNA, which regulate mRNA stability and translation in different tissues and cells, can be removed or introduced into modified messenger RNA. Such cis-regulatory elements may include, but are not limited to, Cis-RNP (Ribonucleoprotein)/RBP (RNA binding protein) regulatory elements, AU-rich element (AUE), structured stem-loop, constitutive decay elements (CDEs), GC-richness and other structured mRNA motifs (Parker B J et al., Genome Research, 2011, 21, 1929-1943, which is herein incorporated by reference in its entirety). For example, CDEs are a class of regulatory motifs that mediate mRNA degradation through their interaction with Roquin proteins. In particular, CDEs are found in many mRNAs that encode regulators of development and inflammation to limit cytokine production in macrophage (Leppek K et al., 2013, Cell, 153, 869-881, which is herein incorporated by reference in its entirety).

[0215] In one embodiment, a particular CDE can be introduced to the nucleic acids or mRNA when the degradation of polypeptides in a cell or tissue is desired. A particular CDE can also be removed from the nucleic acids or mRNA to maintain a more stable mRNA in a cell or tissue for sustaining protein expression.

Auxotrophic mRNA

[0216] In one embodiment, the nucleic acids or mRNA of the present invention may be auxotrophic. As used herein, the term “auxotrophic” refers to mRNA that comprises at least one feature that triggers, facilitates or induces the degradation or inactivation of the mRNA in response to spatial or temporal cues such that protein expression is substantially prevented or reduced. Such spatial or temporal cues include the location of the mRNA to be translated such as a particular tissue or organ or cellular environment. Also contemplated are cues involving temperature, pH, ionic strength, moisture content and the like.

[0217] In one embodiment, the feature is located in a terminal region of the nucleic acids or mRNA of the present invention. As a non-limiting example, the auxotrophic mRNA may contain a miR binding site in the terminal region which binds to a miR expressed in a selected tissue so that the expression of the auxotrophic mRNA is substantially prevented or reduced in the selected tissue. To this end and for example, an auxotrophic mRNA containing a miR-122 binding site will not produce protein if localized to the liver since miR-122 is expressed in the liver and binding of the miR would effectuate destruction of the auxotrophic mRNA. As a non-limiting example, HEK293 cells do not express miR-122 so there would be little to no downregulation of a nucleic acid or mRNA of the present invention having a miR-122 sequence in HEK293 but for hepatocytes which do expression miR-122 there would be a downregulation of a nucleic acid or mRNA of the present invention having a miR-122 sequence in hepatocytes (see e.g., the study outlined Example 14). As another non-limiting example, the miR-122 level can be measured in HeLa cells, primary human hepatocytes and primary rat hepatocytes prior to administration with a nucleic acid or mRNA of the present invention encoding at least one miR-122 binding site, miR-122 binding site without the seed sequence or a miR-122 binding site After administration the expression of the modified nucleic acid with a microRNA sequence can be measured to determine the dampening effect of the miR-122 in the modified nucleic acid (see e.g., the studies outlined in Examples 28, 29, 30, 35, 45, 46 and 47). As yet another non-limiting example, the effectiveness of the miR-122 binding site, miR-122 seed or the miR-122 binding site without the seed in different 3′UTRs may be evaluated in order to determine the proper UTR for the desired outcome such as, but not limited to, the highest dampening effect (see e.g., the study outlined in Example 35 and 46).

[0218] In one embodiment, the degradation or inactivation of auxotrophic mRNA may comprise a feature responsive to a change in pH. As a non-limiting example, the auxotrophic mRNA may be triggered in an environment having a pH of between pH 4.5 to 8.0 such as at a pH of 5.0 to 6.0 or a pH of 6.0 to 6.5. The change in pH may be a change of 0.1 unit, 0.2 units, 0.3 units, 0.4 units, 0.5 units, 0.6 units, 0.7 units, 0.8 units, 0.9 units, 1.0 units, 1.1 units, 1.2 units, 1.3 units, 1.4 units, 1.5 units, 1.6 units, 1.7 units, 1.8 units, 1.9 units, 2.0 units, 2.1 units, 2.2 units, 2.3 units, 2.4 units, 2.5 units, 2.6 units, 2.7 units, 2.8 units, 2.9 units, 3.0 units, 3.1 units, 3.2 units, 3.3 units, 3.4 units, 3.5 units, 3.6 units, 3.7 units, 3.8 units, 3.9 units, 4.0 units or more.

[0219] In another embodiment, the degradation or inactivation of auxotrophic mRNA may be triggered or induced by changes in temperature. As a non-limiting example, a change of temperature from room temperature to body temperature. The change of temperature may be less than 1° C., less than 5° C., less than 10° C., less than 15° C., less than 20° C., less than 25° C. or more than 25° C.

[0220] In yet another embodiment, the degradation or inactivation of auxotrophic mRNA may be triggered or induced by a change in the levels of ions in the subject. The ions may be cations or anions such as, but not limited to, sodium ions, potassium ions, chloride ions, calcium ions, magnesium ions and/or phosphate ions.

### 3′ UTR and the AU Rich Elements

[0221] 3′UTRs are known to have stretches of Adenosines and Uridines embedded in them. These AU rich signatures are particularly prevalent in genes with high rates of turnover. Based on their sequence features and functional properties, the AU rich elements (AREs) can be separated into three classes (Chen et al, 1995): Class I AREs contain several dispersed copies of an AUUUA motif within U-rich regions. C-Myc and MyoD contain class I AREs. Class II AREs possess two or more overlapping UUAUUUA(U/A)(U/A) nonamers. Molecules containing this type of AREs include GM-CSF and TNF-a. Class III ARES are less well defined. These U rich regions do not contain an AUUUA motif. c-Jun and Myogenin are two well-studied examples of this class. Most proteins binding to the AREs are known to destabilize the messenger, whereas members of the ELAV family, most notably HuR, have been documented to increase the stability of mRNA. HuR binds to AREs of all the three classes. Engineering the HuR specific binding sites into the 3′ UTR of nucleic acid molecules will lead to HuR binding and thus, stabilization of the message in vivo.

[0222] Introduction, removal or modification of 3′ UTR AU rich elements (AREs) can be used to modulate the stability of nucleic acids or mRNA of the invention. When engineering specific nucleic acids or mRNA, one or more copies of an ARE can be introduced to make nucleic acids or mRNA of the invention less stable and thereby curtail translation and decrease production of the resultant protein. Likewise, AREs can be identified and removed or mutated to increase the intracellular stability and thus increase translation and production of the resultant protein. Transfection experiments can be conducted in relevant cell lines, using nucleic acids or mRNA of the invention and protein production can be assayed at various time points post-transfection. For example, cells can be transfected with different ARE-engineering molecules and by using an ELISA kit to the relevant protein and assaying protein produced at 6 hr, 12 hr, 24 hr, 48 hr, and 7 days post-transfection.

### 3′ UTR and Triple Helices

[0223] In one embodiment, nucleic acids of the present invention may include a triple helix on the 3′ end of the modified nucleic acid, enhanced modified RNA or ribonucleic acid. The 3′ end of the nucleic acids of the present invention may include a triple helix alone or in combination with a Poly-A tail.

[0224] In one embodiment, the nucleic acid of the present invention may comprise at least a first and a second U-rich region, a conserved stem loop region between the first and second region and an A-rich region. The first and second U-rich region and the A-rich region may associate to form a triple helix on the 3′ end of the nucleic acid. This triple helix may stabilize the nucleic acid, enhance the translational efficiency of the nucleic acid and/or protect the 3′ end from degradation. Exemplary triple helices include, but are not limited to, the triple helix sequence of metastasis-associated lung adenocarcinoma transcript 1 (MALAT1), MEN-0 and polyadenylated nuclear (PAN) RNA (See Wilusz et al., Genes & Development 2012 26:2392-2407; herein incorporated by reference in its entirety). In one embodiment, the 3′ end of the modified nucleic acids, enhanced modified RNA or ribonucleic acids of the present invention comprises a first U-rich region comprising TTTTTCTTTT (SEQ ID NO: 1), a second U-rich region comprising TTTTGCTTTTT (SEQ ID NO: 2) or TTTTGCTTTT (SEQ ID NO: 3), an A-rich region comprising AAAAAGCAAAA (SEQ ID NO: 4). In another embodiment, the 3′ end of the nucleic acids of the present invention comprises a triple helix formation structure comprising a first U-rich region, a conserved region, a second U-rich region and an A-rich region.

[0225] In one embodiment, the triple helix may be formed from the cleavage of a MALAT1 sequence prior to the cloverleaf structure. While not meaning to be bound by theory, MALAT1 is a long non-coding RNA which, when cleaved, forms a triple helix and a tRNA-like cloverleaf structure. The MALAT1 transcript then localizes to nuclear speckles and the tRNA-like cloverleaf localizes to the cytoplasm (Wilusz et al. Cell 2008 135(5): 919-932; herein incorporated by reference in its entirety).

[0226] As a non-limiting example, the terminal end of the nucleic acid of the present invention comprising the MALAT1 sequence can then form a triple helix structure, after RNaseP cleavage from the cloverleaf structure, which stabilizes the nucleic acid (Peart et al. Non-mRNA 3′ end formation: how the other half lives; WIREs RNA 2013; herein incorporated by reference in its entirety).

[0227] In one embodiment, the nucleic acids or mRNA described herein comprise a MALAT1 sequence. In another embodiment, the nucleic acids or mRNA may be polyadenylated. In yet another embodiment, the nucleic acids or mRNA is not polyadenylated but has an increased resistance to degradation compared to unmodified nucleic acids or mRNA.

[0228] In one embodiment, the nucleic acids of the present invention may comprise a MALAT1 sequence in the second flanking region (e.g., the 3′UTR). As a non-limiting example, the MALAT1 sequence may be human or mouse (see e.g., the polynucleotides described in Table 37 in Example 38).

[0229] In another embodiment, the cloverleaf structure of the MALAT1 sequence may also undergo processing by RNaseZ and CCA adding enzyme to form a tRNA-like structure called mascRNA (MALAT1-associated small cytoplasmic RNA). As a non-limiting example, the mascRNA may encode a protein or a fragment thereof and/or may comprise a microRNA sequence. The mascRNA may comprise at least one chemical modification described herein.

### Stem Loop

[0230] In one embodiment, the nucleic acids of the present invention may include a stem loop such as, but not limited to, a histone stem loop. The stem loop may be a nucleotide sequence that is about 25 or about 26 nucleotides in length such as, but not limited to, SEQ ID NOs: 7-17 as described in International Patent Publication No. WO2013103659, herein incorporated by reference in its entirety. The histone stem loop may be located 3′ relative to the coding region (e.g., at the 3′ terminus of the coding region). As a non-limiting example, the stem loop may be located at the 3′ end of a nucleic acid described herein.

[0231] In one embodiment, the stem loop may be located in the second terminal region. As a non-limiting example, the stem loop may be located within an untranslated region (e.g., 3′UTR) in the second terminal region.

[0232] In one embodiment, the nucleic acid such as, but not limited to mRNA, which comprises the histone stem loop may be stabilized by the addition of at least one chain terminating nucleoside. Not wishing to be bound by theory, the addition of at least one chain terminating nucleoside may slow the degradation of a nucleic acid and thus can increase the half-life of the nucleic acid.

[0233] In one embodiment, the chain terminating nucleoside may be, but is not limited to, those described in International Patent Publication No. WO2013103659, herein incorporated by reference in its entirety. In another embodiment, the chain terminating nucleosides which may be used with the present invention includes, but is not limited to, 3′-deoxyadenosine (cordycepin), 3′-deoxyuridine, 3′-deoxycytosine, 3′-deoxyguanosine, 3′-deoxythymine, 2′,3′-dideoxynucleosides, such as 2′,3′-dideoxyadenosine, 2′,3′-dideoxyuridine, 2′,3′-dideoxycytosine, 2′,3′-dideoxyguanosine, 2′,3′-dideoxythymine, a 2′-deoxynucleoside, or a —O— methylnucleoside.

[0234] In another embodiment, the nucleic acid such as, but not limited to mRNA, which comprises the histone stem loop may be stabilized by a modification to the 3′region of the nucleic acid that can prevent and/or inhibit the addition of oligio(U) (see e.g., International Patent Publication No. WO2013103659, herein incorporated by reference in its entirety).

[0235] In yet another embodiment, the nucleic acid such as, but not limited to mRNA, which comprises the histone stem loop may be stabilized by the addition of an oligonucleotide that terminates in a 3′-deoxynucleoside, 2′,3′-dideoxynucleoside 3′-0-methylnucleosides, 3-0-ethylnucleosides, 3′-arabinosides, and other modified nucleosides known in the art and/or described herein.

[0236] In one embodiment, the nucleic acids of the present invention may include a histone stem loop, a polyA tail sequence and/or a 5′cap structure. The histone stem loop may be before and/or after the polyA tail sequence. The nucleic acids comprising the histone stem loop and a polyA tail sequence may include a chain terminating nucleoside described herein.

[0237] In another embodiment, the nucleic acids of the present invention may include a histone stem loop and a 5′cap structure. The 5′cap structure may include, but is not limited to, those described herein and/or known in the art.

[0238] In one embodiment, the conserved stem loop region may comprise a miR sequence described herein. As a non-limiting example, the stem loop region may comprise the seed sequence of a miR sequence described herein. In another non-limiting example, the stem loop region may comprise a miR-122 seed sequence.

[0239] In another embodiment, the conserved stem loop region may comprise a miR sequence described herein and may also include a TEE sequence.

[0240] In one embodiment, the incorporation of a miR sequence and/or a TEE sequence changes the shape of the stem loop region which may increase and/or decrease translation. (see e.g, Kedde et al. A Pumilio-induced RNA structure switch in p27-3′UTR controls miR-221 and miR-22 accessibility. Nature Cell Biology. 2010, herein incorporated by reference in its entirety).

[0241] In one embodiment, the modified nucleic acids described herein may comprise at least one histone stem-loop and a polyA sequence or polyadenylation signal. Non-limiting examples of nucleic acid sequences encoding for at least one histone stem-loop and a polyA sequence or a polyadenylation signal are described in International Patent Publication No. WO2013120497, WO2013120629, WO2013120500, WO2013120627, WO2013120498, WO2013120626, WO2013120499 and WO2013120628, the contents of each of which is herein incorporated by reference in their entirety. In one embodiment, the nucleic acid encoding for a histone stem loop and a polyA sequence or a polyadenylation signal may code for a pathogen antigen or fragment thereof such as the nucleic acid sequences described in International Patent Publication No WO2013120499 and WO2013120628, the contents of which is herein incorporated by reference in its entirety. In another embodiment, the nucleic acid encoding for a histone stem loop and a polyA sequence or a polyadenylation signal may code for a therapeutic protein such as the nucleic acid sequences described in International Patent Publication No WO2013120497 and WO2013120629, the contents of which is herein incorporated by reference in its entirety. In one embodiment, the nucleic acid encoding for a histone stem loop and a polyA sequence or a polyadenylation signal may code for a tumor antigen or fragment thereof such as the nucleic acid sequences described in International Patent Publication No WO2013120500 and WO2013120627, the contents of which is herein incorporated by reference in its entirety. In another embodiment, the nucleic acid encoding for a histone stem loop and a polyA sequence or a polyadenylation signal may code for a allergenic antigen or an autoimmune self-antigen such as the nucleic acid sequences described in International Patent Publication No WO2013120498 and WO2013120626, the contents of which is herein incorporated by reference in its entirety.

### 5′ Capping

[0242] The 5′ cap structure of an mRNA is involved in nuclear export, increasing mRNA stability and binds the mRNA Cap Binding Protein (CBP), which is responsible for mRNA stability in the cell and translation competency through the association of CBP with poly(A) binding protein to form the mature cyclic mRNA species. The cap further assists the removal of 5′ proximal introns removal during mRNA splicing.

[0243] Endogenous mRNA molecules may be 5′-end capped generating a 5′-ppp-5′-triphosphate linkage between a terminal guanosine cap residue and the 5′-terminal transcribed sense nucleotide of the mRNA. This 5′-guanylate cap may then be methylated to generate an N7-methyl-guanylate residue. The ribose sugars of the terminal and/or anteterminal transcribed nucleotides of the 5′ end of the mRNA may optionally also be 2′-O-methylated. 5′-decapping through hydrolysis and cleavage of the guanylate cap structure may target a nucleic acid molecule, such as an mRNA molecule, for degradation.

[0244] Modifications to the nucleic acids of the present invention may generate a non-hydrolyzable cap structure preventing decapping and thus increasing mRNA half-life. Because cap structure hydrolysis requires cleavage of 5′-ppp-5′ phosphorodiester linkages, modified nucleotides may be used during the capping reaction. For example, a Vaccinia Capping Enzyme from New England Biolabs (Ipswich, MA) may be used with α-thio-guanosine nucleotides according to the manufacturer's instructions to create a phosphorothioate linkage in the 5′-ppp-5′ cap. Additional modified guanosine nucleotides may be used such as α-methyl-phosphonate and seleno-phosphate nucleotides.

[0245] Additional modifications include, but are not limited to, 2′-O-methylation of the ribose sugars of 5′-terminal and/or 5′-anteterminal nucleotides of the mRNA (as mentioned above) on the 2′-hydroxyl group of the sugar ring. Multiple distinct 5′-cap structures can be used to generate the 5′-cap of a nucleic acid molecule, such as an mRNA molecule.

[0246] Cap analogs, which herein are also referred to as synthetic cap analogs, chemical caps, chemical cap analogs, or structural or functional cap analogs, differ from natural (i.e. endogenous, wild-type or physiological) 5′-caps in their chemical structure, while retaining cap function. Cap analogs may be chemically (i.e. non-enzymatically) or enzymatically synthesized and/linked to a nucleic acid molecule.

[0247] For example, the Anti-Reverse Cap Analog (ARCA) cap contains two guanines linked by a 5′-5′-triphosphate group, wherein one guanine contains an N7 methyl group as well as a 3′-O-methyl group (i.e., N7,3′-O-dimethyl-guanosine-5′-triphosphate-5′-guanosine (m7G-3′mppp-G; which may equivaliently be designated 3′ O-Me-m7G(5′)ppp(5′)G). The 3′-O atom of the other, unmodified, guanine becomes linked to the 5′-terminal nucleotide of the capped nucleic acid molecule (e.g. an mRNA or mmRNA). The N7- and 3′-O-methlyated guanine provides the terminal moiety of the capped nucleic acid molecule (e.g. mRNA or mmRNA).

[0248] Another exemplary cap is mCAP, which is similar to ARCA but has a 2′-O-methyl group on guanosine (i.e., N7,2′-O-dimethyl-guanosine-5′-triphosphate-5′-guanosine, m7Gm-ppp-G).

[0249] In one embodiment, the cap is a dinucleotide cap analog. As a non-limiting example, the dinucleotide cap analog may be modified at different phosphate positions with a boranophosphate group or a phophoroselenoate group such as the dinucleotide cap analogs described in U.S. Pat. No. 8,519,110, the contents of which are herein incorporated by reference in its entirety.

[0250] In another embodiment, the cap is a cap analog is a N7-(4-chlorophenoxyethyl) substituted dicucleotide form of a cap analog known in the art and/or described herein. Non-limiting examples of a N7-(4-chlorophenoxyethyl) substituted dicucleotide form of a cap analog include a N7-(4-chlorophenoxyethyl)-G(5′)ppp(5′)G and a N7-(4-chlorophenoxyethyl)-m³′-G(5′)ppp(5′)G cap analog (See e.g., the various cap analogs and the methods of synthesizing cap analogs described in Kore et al. Bioorganic & Medicinal Chemistry 2013 21:4570-4574; the contents of which are herein incorporated by reference in its entirety). In another embodiment, a cap analog of the present invention is a 4-chloro/bromophenoxyethyl analog.

[0251] While cap analogs allow for the concomitant capping of a nucleic acid molecule in an in vitro transcription reaction, up to 20% of transcripts remain uncapped. This, as well as the structural differences of a cap analog from an endogenous 5′-cap structures of nucleic acids produced by the endogenous, cellular transcription machinery, may lead to reduced translational competency and reduced cellular stability.

[0252] Modified nucleic acids of the invention may also be capped post-transcriptionally, using enzymes, in order to generate more authentic 5′-cap structures. As used herein, the phrase “more authentic” refers to a feature that closely mirrors or mimics, either structurally or functionally, an endogenous or wild type feature. That is, a “more authentic” feature is better representative of an endogenous, wild-type, natural or physiological cellular function and/or structure as compared to synthetic features or analogs, etc., of the prior art, or which outperforms the corresponding endogenous, wild-type, natural or physiological feature in one or more respects. Non-limiting examples of more authentic 5′cap structures of the present invention are those which, among other things, have enhanced binding of cap binding proteins, increased half life, reduced susceptibility to 5′ endonucleases and/or reduced 5′decapping, as compared to synthetic 5′cap structures known in the art (or to a wild-type, natural or physiological 5′cap structure). For example, recombinant Vaccinia Virus Capping Enzyme and recombinant 2′-O-methyltransferase enzyme can create a canonical 5′-5′-triphosphate linkage between the 5′-terminal nucleotide of an mRNA and a guanine cap nucleotide wherein the cap guanine contains an N7 methylation and the 5′-terminal nucleotide of the mRNA contains a 2′-O-methyl. Such a structure is termed the Cap1 structure. This cap results in a higher translational-competency and cellular stability and a reduced activation of cellular pro-inflammatory cytokines, as compared, e.g., to other 5′cap analog structures known in the art. Cap structures include 7 mG(5′)ppp(5′)N, pN2p (cap 0), 7 mG(5′)ppp(5′)NlmpNp (cap 1), 7 mG(5′)-ppp(5′)NlmpN2mp (cap 2) and m(7)Gpppm(3)(6,6,2′)Apm(2′)Apm(2′)Cpm(2)(3,2′)Up (cap 4).

[0253] Because the modified nucleic acids may be capped post-transcriptionally, and because this process is more efficient, nearly 100% of the modified nucleic acids may be capped. This is in contrast to ˜80% when a cap analog is linked to an mRNA in the course of an in vitro transcription reaction.

[0254] According to the present invention, 5′ terminal caps may include endogenous caps or cap analogs. According to the present invention, a 5′ terminal cap may comprise a guanine analog. Useful guanine analogs include inosine, N1-methyl-guanosine, 2′fluoro-guanosine, 7-deaza-guanosine, 8-oxo-guanosine, 2-amino-guanosine, LNA-guanosine, and 2-azido-guanosine.

[0255] In one embodiment, the nucleic acids described herein may contain a modified 5′cap. A modification on the 5′cap may increase the stability of mRNA, increase the half-life of the mRNA, and could increase the mRNA translational efficiency. The modified 5′cap may include, but is not limited to, one or more of the following modifications: modification at the 2′ and/or 3′ position of a capped guanosine triphosphate (GTP), a replacement of the sugar ring oxygen (that produced the carbocyclic ring) with a methylene moiety (CH₂), a modification at the triphosphate bridge moiety of the cap structure, or a modification at the nucleobase (G) moiety.

[0256] The 5′cap structure that may be modified includes, but is not limited to, the caps described herein such as Cap0 having the substrate structure for cap dependent translation of:

[chemical structure]

or Cap1 having the substrate structure for cap dependent translation of:

[chemical structure]

[0257] As a non-limiting example, the modified 5′cap may have the substrate structure for cap dependent translation of:

[chemical structure]

[chemical structure]

[chemical structure]

[chemical structure]

[chemical structure]

where R₁ and R₂ are defined in Table 1:

TABLE 1

| Cap | | |
|---|---|---|
| Structure | | |
| Number | R₁ | R₂ |
| CAP-022 | C₂H₅ (Ethyl) | H |
| CAP-023 | H | C₂H₅ (Ethyl) |
| CAP-024 | C₂H₅ (Ethyl) | C₂H₅ (Ethyl) |
| CAP-025 | C₃H₇ (Propyl) | H |
| CAP-026 | H | C₃H₇ (Propyl) |
| CAP-027 | C₃H₇ (Propyl) | C₃H₇ (Propyl) |
| CAP-028 | C₄H₉ (Butyl) | H |
| CAP-029 | H | C₄H₉ (Butyl) |
| CAP-030 | C₄H₉ (Butyl) | C₄H₉ (Butyl) |
| CAP-031 | C₅H₁₁ (Pentyl) | H |
| CAP-032 | H | C₅H₁₁ (Pentyl) |
| CAP-033 | C₅H₁₁ (Pentyl) | C₅H₁₁ (Pentyl) |
| CAP-034 | H₂C—C≡CH (Propargyl) | H |
| CAP-035 | H | H₂C—C≡CH (Propargyl) |
| CAP-036 | H₂C—C≡CH (Propargyl) | H₂C—C≡CH (Propargyl) |
| CAP-037 | CH₂CH═CH₂ (Allyl) | H |
| CAP-038 | H | CH₂CH═CH₂ (Allyl) |
| CAP-039 | CH₂CH═CH₂ (Allyl) | CH₂CH═CH₂ (Allyl) |
| CAP-040 | CH₂OCH₃ (MOM) | H |
| CAP-041 | H | CH₂OCH₃ (MOM) |
| CAP-042 | CH₂OCH₃ (MOM) | CH₂OCH₃ (MOM) |
| CAP-043 | CH₂OCH₂CH₂OCH₃ (MEM) | H |
| CAP-044 | H | CH₂OCH₂CH₂OCH₃ (MEM) |
| CAP-045 | CH₂OCH₂CH₂OCH₃ (MEM) | CH₂OCH₂CH₂OCH₃ (MEM) |
| CAP-046 | CH₂SCH₃ (MTM) | H |
| CAP-047 | H | CH₂SCH₃ (MTM) |
| CAP-048 | CH₂SCH₃ (MTM) | CH₂SCH₃ (MTM) |
| CAP-049 | CH₂C₆H₅ (Benzyl) | H |
| CAP-050 | H | CH₂C₆H₅ (Benzyl) |
| CAP-051 | CH₂C₆H₅ (Benzyl) | CH₂C₆H₅ (Benzyl) |
| CAP-052 | CH₂OCH₂C₆H₅ (BOM) | H |
| CAP-053 | H | CH₂OCH₂C₆H₅ (BOM) |
| CAP-054 | CH₂OCH₂C₆H₅ (BOM) | CH₂OCH₂C₆H₅ (BOM) |
| CAP-055 | CH₂C₆H₄—OMe (p- | H |
| | Methoxybenzyl) | |
| CAP-056 | H | CH₂C₆H₄—OMe (p- |
| | | Methoxybenzyl) |
| CAP-057 | CH₂C₆H₄—OMe (p- | CH₂C₆H₄—OMe (p- |
| | Methoxybenzyl) | Methoxybenzyl) |
| CAP-058 | CH₂C₆H₄—NO₂ | H |
| | (p-Nitrobenzyl) | |
| CAP-059 | H | CH₂C₆H₄—NO₂ |
| | | (p-Nitrobenzyl) |
| CAP-060 | CH₂C₆H₄—NO₂ | CH₂C₆H₄—NO₂ |
| | (p-Nitrobenzyl) | (p-Nitrobenzyl) |
| CAP-061 | CH₂C₆H₄—X (p-Halobenzyl) | H |
| | where X = F, Cl, Br or I | |
| CAP-062 | H | CH₂C₆H₄—X (p-Halobenzyl) |
| | | where X = F, Cl, Br or I |
| CAP-063 | CH₂C₆H₄—X (p-Halobenzyl) | CH₂C₆H₄—X (p-Halobenzyl) |
| | where X = F, Cl, Br or I | where X = F, Cl, Br or I |
| CAP-064 | CH₂C₆H₄—N₃ | H |
| | (p-Azidobenzyl) | |
| CAP-065 | H | CH₂C₆H₄—N₃ |
| | | (p-Azidobenzyl) |
| CAP-066 | CH₂C₆H₄—N₃ | CH₂C₆H₄—N₃ |
| | (p-Azidobenzyl) | (p-Azidobenzyl) |
| CAP-067 | CH₂C₆H₄—CF₃ (p- | H |
| | Trifluoromethylbenzyl) | |
| CAP-068 | H | CH₂C₆H₄—CF₃ (p- |
| | | Trifluoromethylbenzyl) |
| CAP-069 | CH₂C₆H₄—CF₃ (p- | CH₂C₆H₄—CF₃ (p- |
| | Trifluoromethylbenzyl) | Trifluoromethylbenzyl) |
| CAP-070 | CH₂C₆H₄—OCF₃ (p- | H |
| | Trifluoromethoxylbenzyl) | |
| CAP-071 | H | CH₂C₆H₄—OCF₃ (p- |
| | | Trifluoromethoxylbenzyl) |
| CAP-072 | CH₂C₆H₄—OCF₃ (p- | CH₂C₆H₄—OCF₃ (p- |
| | Trifluoromethoxylbenzyl) | Trifluoromethoxylbenzyl) |
| CAP-073 | CH₂C₆H₃—(CF₃)₂ [2,4- | H |
| | bis(Trifluoromethyl)benzyl] | |
| CAP-074 | H | CH₂C₆H₃—(CF₃)₂ [2,4- |
| | | bis(Trifluoromethyl)benzyl] |
| CAP-075 | CH₂C₆H₃—(CF₃)₂ [2,4- | CH₂C₆H₃—(CF₃)₂ [2,4- |
| | bis(Trifluoromethyl)benzyl] | bis(Trifluoromethyl)benzyl] |
| CAP-076 | Si(C₆H₅)₂C₄H₉ (t- | H |
| | Butyldiphenylsilyl) | |
| CAP-077 | H | Si(C₆H₅)₂C₄H₉ (t- |
| | | Butyldiphenylsilyl) |
| CAP-078 | Si(C₆H₅)₂C₄H₉ (t- | Si(C₆H₅)₂C₄H₉ (t- |
| | Butyldiphenylsilyl) | Butyldiphenylsilyl) |
| CAP-079 | CH₂CH₂CH═CH₂ | H |
| | (Homoallyl) | |
| CAP-080 | H | CH₂CH₂CH═CH₂ |
| | | (Homoallyl) |
| CAP-081 | CH₂CH₂CH═CH₂ | CH₂CH₂CH═CH₂ |
| | (Homoallyl) | (Homoallyl) |
| CAP-082 | P(O)(OH)₂ (MP) | H |
| CAP-083 | H | P(O)(OH)₂ (MP) |
| CAP-084 | P(O)(OH)₂ (MP) | P(O)(OH)₂ (MP) |
| CAP-085 | P(S)(OH)₂ (Thio-MP) | H |
| CAP-086 | H | P(S)(OH)₂ (Thio-MP) |
| CAP-087 | P(S)(OH)₂ (Thio-MP) | P(S)(OH)₂ (Thio-MP) |
| CAP-088 | P(O)(CH₃)(OH) | H |
| | (Methylphophonate) | |
| CAP-089 | H | P(O)(CH₃)(OH) |
| | | (Methylphophonate) |
| CAP-090 | P(O)(CH₃)(OH) | P(O)(CH₃)(OH) |
| | (Methylphophonate) | (Methylphophonate) |
| CAP-091 | PN(ⁱPr)₂(OCH₂CH₂CN) | H |
| | (Phosporamidite) | |
| CAP-092 | H | PN(ⁱPr)₂(OCH₂CH₂CN) |
| | | (Phosporamidite) |
| CAP-093 | PN(ⁱPr)₂(OCH₂CH₂CN) | PN(ⁱPr)₂(OCH₂CH₂CN) |
| | (Phosporamidite) | (Phosporamidite) |
| CAP-094 | SO₂CH₃ | H |
| | (Methanesulfonic acid) | |
| CAP-095 | H | SO₂CH₃ |
| | | (Methanesulfonic acid) |
| CAP-096 | SO₂CH₃ | SO₂CH₃ |
| | (Methanesulfonic acid) | (Methanesulfonic acid) |

or

[chemical structure]

where R₁ and R₂ are defined in Table 2:

TABLE 2

| Cap | | |
|---|---|---|
| Structure | | |
| Number | R1 | R2 |
| CAP-097 | NH₂ (amino) | H |
| CAP-098 | H | NH₂ (amino) |
| CAP-099 | NH₂ (amino) | NH₂ (amino) |
| CAP-100 | N₃ (Azido) | H |
| CAP-101 | H | N₃ (Azido) |
| CAP-102 | N₃ (Azido) | N₃ (Azido) |
| CAP-103 | X (Halo: F, Cl, Br, I) | H |
| CAP-104 | H | X (Halo: F, Cl, Br, I) |
| CAP-105 | X (Halo: F, Cl, Br, I) | X (Halo: F, Cl, Br, I) |
| CAP-106 | SH (Thiol) | H |
| CAP-107 | H | SH (Thiol) |
| CAP-108 | SH (Thiol) | SH (Thiol) |
| CAP-109 | SCH₃ (Thiomethyl) | H |
| CAP-110 | H | SCH₃ (Thiomethyl) |
| CAP-111 | SCH₃ (Thiomethyl) | SCH₃ (Thiomethyl) |

[0258] In Table 1, “MOM” stands for methoxymethyl, “MEM” stands for methoxyethoxymethyl, “MTM” stands for methylthiomethyl, “BOM” stands for benzyloxymethyl and “MP” stands for monophosphonate. In Table 1 and 2, “F” stands for fluorine, “Cl” stands for chlorine, “Br” stands for bromine and “I” stands for iodine.

[0259] In a non-limiting example, the modified 5′cap may have the substrate structure for vaccinia mRNA capping enzyme of:

[chemical structure]

[chemical structure]

[chemical structure]

[chemical structure]

[chemical structure]

where R₁ and R₂ are defined in Table 3:

TABLE 3

| Cap | | |
|---|---|---|
| Structure | | |
| Number | R₁ | R₂ |
| CAP-136 | C₂H₅ (Ethyl) | H |
| CAP-137 | H | C₂H₅ (Ethyl) |
| CAP-138 | C₂H₅ (Ethyl) | C₂H₅ (Ethyl) |
| CAP-139 | C₃H₇ (Propyl) | H |
| CAP-140 | H | C₃H₇ (Propyl) |
| CAP-141 | C₃H₇ (Propyl) | C₃H₇ (Propyl) |
| CAP-142 | C₄H₉ (Butyl) | H |
| CAP-143 | H | C₄H₉ (Butyl) |
| CAP-144 | C₄H₉ (Butyl) | C₄H₉ (Butyl) |
| CAP-145 | C₅H₁₁ (Pentyl) | H |
| CAP-146 | H | C₅H₁₁ (Pentyl) |
| CAP-147 | C₅H₁₁ (Pentyl) | C₅H₁₁ (Pentyl) |
| CAP-148 | H₂C—C≡CH (Propargyl) | H |
| CAP-149 | H | H₂C—C≡CH (Propargyl) |
| CAP-150 | H₂C—C≡CH (Propargyl) | H₂C—C≡CH (Propargyl) |
| CAP-151 | CH₂CH═CH₂ (Allyl) | H |
| CAP-152 | H | CH₂CH═CH₂ (Allyl) |
| CAP-153 | CH₂CH═CH₂ (Allyl) | CH₂CH═CH₂ (Allyl) |
| CAP-154 | CH₂OCH₃ (MOM) | H |
| CAP-155 | H | CH₂OCH₃ (MOM) |
| CAP-156 | CH₂OCH₃ (MOM) | CH₂OCH₃ (MOM) |
| CAP-157 | CH₂OCH₂CH₂OCH₃ (MEM) | H |
| CAP-158 | H | CH₂OCH₂CH₂OCH₃ (MEM) |
| CAP-159 | CH₂OCH₂CH₂OCH₃ (MEM) | CH₂OCH₂CH₂OCH₃ (MEM) |
| CAP-160 | CH₂SCH₃ (MTM) | H |
| CAP-161 | H | CH₂SCH₃ (MTM) |
| CAP-162 | CH₂SCH₃ (MTM) | CH₂SCH₃ (MTM) |
| CAP-163 | CH₂C₆H₅ (Benzyl) | H |
| CAP-164 | H | CH₂C₆H₅ (Benzyl) |
| CAP-165 | CH₂C₆H₅ (Benzyl) | CH₂C₆H₅ (Benzyl) |
| CAP-166 | CH₂OCH₂C₆H₅ (BOM) | H |
| CAP-167 | H | CH₂OCH₂C₆H₅ (BOM) |
| CAP-168 | CH₂OCH₂C₆H₅ (BOM) | CH₂OCH₂C₆H₅ (BOM) |
| CAP-169 | CH₂C₆H₄—OMe (p- | H |
| | Methoxybenzyl) | |
| CAP-170 | H | CH₂C₆H₄—OMe (p- |
| | | Methoxybenzyl) |
| CAP-171 | CH₂C₆H₄—OMe (p- | CH₂C₆H₄—OMe (p- |
| | Methoxybenzyl) | Methoxybenzyl) |
| CAP-172 | CH₂C₆H₄—NO₂ (p- | H |
| | Nitrobenzyl) | |
| CAP-173 | H | CH₂C₆H₄—NO₂ (p- |
| | | Nitrobenzyl) |
| CAP-174 | CH₂C₆H₄—NO₂ (p- | CH₂C₆H₄—NO₂ (p- |
| | Nitrobenzyl) | Nitrobenzyl) |
| CAP-175 | CH₂C₆H₄—X (p-Halobenzyl) | H |
| | where X = F, Cl, Br or I | |
| CAP-176 | H | CH₂C₆H₄—X (p-Halobenzyl) |
| | | where X = F, Cl, Br or I |
| CAP-177 | CH₂C₆H₄—X (p-Halobenzyl) | CH₂C₆H₄—X (p-Halobenzyl) |
| | where X = F, Cl, Br or I | where X = F, Cl, Br or I |
| CAP-178 | CH₂C₆H₄—N₃ | H |
| | (p-Azidobenzyl) | |
| CAP-179 | H | CH₂C₆H₄—N₃ |
| | | (p-Azidobenzyl) |
| CAP-180 | CH₂C₆H₄—N₃ | CH₂C₆H₄—N₃ |
| | (p-Azidobenzyl) | (p-Azidobenzyl) |
| CAP-181 | CH₂C₆H₄—CF₃ (p- | H |
| | Trifluoromethylbenzyl) | |
| CAP-182 | H | CH₂C₆H₄—CF₃ (p- |
| | | Trifluoromethylbenzyl) |
| CAP-183 | CH₂C₆H₄—CF₃ (p- | CH₂C₆H₄—CF₃ (p- |
| | Trifluoromethylbenzyl) | Trifluoromethylbenzyl) |
| CAP-184 | CH₂C₆H₄—OCF₃ (p- | H |
| | Trifluoromethoxylbenzyl) | |
| CAP-185 | H | CH₂C₆H₄—OCF₃ (p- |
| | | Trifluoromethoxylbenzyl) |
| CAP-186 | CH₂C₆H₄—OCF₃ (p- | CH₂C₆H₄—OCF₃ (p- |
| | Trifluoromethoxylbenzyl) | Trifluoromethoxylbenzyl) |
| CAP-187 | CH₂C₆H₃—(CF₃)₂ [2,4- | H |
| | bis(Trifluoromethyl)benzyl] | |
| CAP-188 | H | CH₂C₆H₃—(CF₃)₂ [2,4- |
| | | bis(Trifluoromethyl)benzyl] |
| CAP-189 | CH₂C₆H₃—(CF₃)₂ [2,4- | CH₂C₆H₃—(CF₃)₂ [2,4- |
| | bis(Trifluoromethyl)benzyl] | bis(Trifluoromethyl)benzyl] |
| CAP-190 | Si(C₆H₅)₂C₄H₉ (t- | H |
| | Butyldiphenylsilyl) | |
| CAP-191 | H | Si(C₆H₅)₂C₄H₉ |
| | | (t-Butyldiphenylsilyl) |
| CAP-192 | Si(C₆H₅)₂C₄H₉ (t- | Si(C₆H₅)₂C₄H₉ |
| | Butyldiphenylsilyl) | (t-Butyldiphenylsilyl) |
| CAP-193 | CH₂CH₂CH═CH₂ | H |
| | (Homoallyl) | |
| CAP-194 | H | CH₂CH₂CH═CH₂ |
| | | (Homoallyl) |
| CAP-195 | CH₂CH₂CH═CH₂ | CH₂CH₂CH═CH₂ |
| | (Homoallyl) | (Homoallyl) |
| CAP-196 | P(O)(OH)₂ (MP) | H |
| CAP-197 | H | P(O)(OH)₂ (MP) |
| CAP-198 | P(O)(OH)₂ (MP) | P(O)(OH)₂ (MP) |
| CAP-199 | P(S)(OH)₂ (Thio-MP) | H |
| CAP-200 | H | P(S)(OH)₂ (Thio-MP) |
| CAP-201 | P(S)(OH)₂ (Thio-MP) | P(S)(OH)₂ (Thio-MP) |
| CAP-202 | P(O)(CH₃)(OH) | H |
| | (Methylphophonate) | |
| CAP-203 | H | P(O)(CH₃)(OH) |
| | | (Methylphophonate) |
| CAP-204 | P(O)(CH₃)(OH) | P(O)(CH₃)(OH) |
| | (Methylphophonate) | (Methylphophonate) |
| CAP-205 | PN(ⁱPr)₂(OCH₂CH₂CN) | H |
| | (Phosporamidite) | |
| CAP-206 | H | PN(ⁱPr)₂(OCH₂CH₂CN) |
| | | (Phosporamidite) |
| CAP-207 | PN(ⁱPr)₂(OCH₂CH₂CN) | PN(ⁱPr)₂(OCH₂CH₂CN) |
| | (Phosporamidite) | (Phosporamidite) |
| CAP-208 | SO₂CH₃ | H |
| | (Methanesulfonic acid) | |
| CAP-209 | H | SO₂CH₃ |
| | | (Methanesulfonic acid) |
| CAP-210 | SO₂CH₃ | SO₂CH₃ |
| | (Methanesulfonic acid) | (Methanesulfonic acid) |

or

[chemical structure]

where R₁ and R₂ are defined in Table 4:

TABLE 4

| Cap | | |
|---|---|---|
| Structure | | |
| Number | R1 | R2 |
| CAP-211 | NH₂ (amino) | H |
| CAP-212 | H | NH₂ (amino) |
| CAP-213 | NH₂ (amino) | NH₂ (amino) |
| CAP-214 | N₃ (Azido) | H |
| CAP-215 | H | N₃ (Azido) |
| CAP-216 | N₃ (Azido) | N₃ (Azido) |
| CAP-217 | X (Halo: F, Cl, Br, I) | H |
| CAP-218 | H | X (Halo: F, Cl, Br, I) |
| CAP-219 | X (Halo: F, Cl, Br, I) | X (Halo: F, Cl, Br, I) |
| CAP-220 | SH (Thiol) | H |
| CAP-221 | H | SH (Thiol) |
| CAP-222 | SH (Thiol) | SH (Thiol) |
| CAP-223 | SCH₃ (Thiomethyl) | H |
| CAP-224 | H | SCH₃ (Thiomethyl) |
| CAP-225 | SCH₃ (Thiomethyl) | SCH₃ (Thiomethyl) |

[0260] In Table 3, “MOM” stands for methoxymethyl, “MEM” stands for methoxyethoxymethyl, “MTM” stands for methylthiomethyl, “BOM” stands for benzyloxymethyl and “MP” stands for monophosphonate. In Table 3 and 4, “F” stands for fluorine, “Cl” stands for chlorine, “Br” stands for bromine and “I” stands for iodine.

[0261] In another non-limiting example, of the modified capping structure substrates CAP-112-CAP-225 could be added in the presence of vaccinia capping enzyme with a component to create enzymatic activity such as, but not limited to, S-adenosylmethionine (AdoMet), to form a modified cap for mRNA.

[0262] In one embodiment, the replacement of the sugar ring oxygen (that produced the carbocyclic ring) with a methylene moiety (CH₂) could create greater stability to the C—N bond against phosphorylases as the C—N bond is resistant to acid or enzymatic hydrolysis. The methylene moiety may also increase the stability of the triphosphate bridge moiety and thus increasing the stability of the mRNA. As a non-limiting example, the cap substrate structure for cap dependent translation may have the structure such as, but not limited to, CAP-014 and CAP-015 and/or the cap substrate structure for vaccinia mRNA capping enzyme such as, but not limited to, CAP-123 and CAP-124. In another example, CAP-112-CAP-122 and/or CAP-125-CAP-225, can be modified by replacing the sugar ring oxygen (that produced the carbocyclic ring) with a methylene moiety (CH₂).

[0263] In another embodiment, the triphophosphate bridge may be modified by the replacement of at least one oxygen with sulfur (thio), a borane (BH₃) moiety, a methyl group, an ethyl group, a methoxy group and/or combinations thereof. This modification could increase the stability of the mRNA towards decapping enzymes. As a non-limiting example, the cap substrate structure for cap dependent translation may have the structure such as, but not limited to, CAP-016-CAP-021 and/or the cap substrate structure for vaccinia mRNA capping enzyme such as, but not limited to, CAP-125-CAP-130. In another example, CAP-003-CAP-015, CAP-022-CAP-124 and/or CAP-131-CAP-225, can be modified on the triphosphate bridge by replacing at least one of the triphosphate bridge oxygens with sulfur (thio), a borane (BH₃) moiety, a methyl group, an ethyl group, a methoxy group and/or combinations thereof.

[0264] In one embodiment, CAP-001-134 and/or CAP-136-CAP-225 may be modified to be a thioguanosine analog similar to CAP-135. The thioguanosine analog may comprise additional modifications such as, but not limited to, a modification at the triphosphate moiety (e.g., thio, BH₃, CH₃, C₂H₅, OCH₃, S and S with OCH₃), a modification at the 2′ and/or 3′ positions of 6-thio guanosine as described herein and/or a replacement of the sugar ring oxygen (that produced the carbocyclic ring) as described herein.

[0265] In one embodiment, CAP-001-121 and/or CAP-123-CAP-225 may be modified to be a modified 5′cap similar to CAP-122. The modified 5′cap may comprise additional modifications such as, but not limited to, a modification at the triphosphate moiety (e.g., thio, BH₃, CH₃, C₂Hs, OCH₃, S and S with OCH₃), a modification at the 2′ and/or 3′ positions of 6-thio guanosine as described herein and/or a replacement of the sugar ring oxygen (that produced the carbocyclic ring) as described herein.

[0266] In one embodiment, the 5′cap modification may be the attachment of biotin or conjugation at the 2′ or 3′ position of a GTP.

[0267] In another embodiment, the 5′ cap modification may include a CF₂ modified triphosphate moiety.

### 3′ UTR and Viral Sequences

[0268] Additional viral sequences such as, but not limited to, the translation enhancer sequence of the barley yellow dwarf virus (BYDV-PAV) can be engineered and inserted in the 3′ UTR of the nucleic acids or mRNA of the invention and can stimulate the translation of the construct in vitro and in vivo. Transfection experiments can be conducted in relevant cell lines at and protein production can be assayed by ELISA at 12 hr, 24 hr, 48 hr, 72 hr and day 7 post-transfection.

### IRES Sequences

[0269] Further, provided are nucleic acids containing an internal ribosome entry site (IRES). First identified as a feature Picorna virus RNA, IRES plays an important role in initiating protein synthesis in absence of the 5′ cap structure. An IRES may act as the sole ribosome binding site, or may serve as one of multiple ribosome binding sites of an mRNA. Nucleic acids or mRNA containing more than one functional ribosome binding site may encode several peptides or polypeptides that are translated independently by the ribosomes (“multicistronic nucleic acid molecules”). When nucleic acids or mRNA are provided with an IRES, further optionally provided is a second translatable region. Examples of IRES sequences that can be used according to the invention include without limitation, those from picornaviruses (e.g. FMDV), pest viruses (CFFV), polio viruses (PV), encephalomyocarditis viruses (ECMV), foot-and-mouth disease viruses (FMDV), hepatitis C viruses (HCV), classical swine fever viruses (CSFV), murine leukemia virus (MLV), simian immune deficiency viruses (SIV) or cricket paralysis viruses (CrPV).

### Terminal Architecture Modifications: Poly-A Tails

[0270] During RNA processing, a long chain of adenine nucleotides (poly-A tail) is normally added to a messenger RNA (mRNA) molecules to increase the stability of the molecule. Immediately after transcription, the 3′ end of the transcript is cleaved to free a 3′ hydroxyl. Then poly-A polymerase adds a chain of adenine nucleotides to the RNA. The process, called polyadenylation, adds a poly-A tail that is between 100 and 250 residues long.

[0271] It has been discovered that unique poly-A tail lengths provide certain advantages to the modified RNAs of the present invention.

[0272] Generally, the length of a poly-A tail of the present invention is greater than 30 nucleotides in length. In another embodiment, the poly-A tail is greater than 35 nucleotides in length. In another embodiment, the length is at least 40 nucleotides. In another embodiment, the length is at least 45 nucleotides. In another embodiment, the length is at least 55 nucleotides. In another embodiment, the length is at least 60 nucleotides. In another embodiment, the length is at least 60 nucleotides. In another embodiment, the length is at least 80 nucleotides. In another embodiment, the length is at least 90 nucleotides. In another embodiment, the length is at least 100 nucleotides. In another embodiment, the length is at least 120 nucleotides. In another embodiment, the length is at least 140 nucleotides. In another embodiment, the length is at least 160 nucleotides. In another embodiment, the length is at least 180 nucleotides. In another embodiment, the length is at least 200 nucleotides. In another embodiment, the length is at least 250 nucleotides. In another embodiment, the length is at least 300 nucleotides. In another embodiment, the length is at least 350 nucleotides. In another embodiment, the length is at least 400 nucleotides. In another embodiment, the length is at least 450 nucleotides. In another embodiment, the length is at least 500 nucleotides. In another embodiment, the length is at least 600 nucleotides. In another embodiment, the length is at least 700 nucleotides. In another embodiment, the length is at least 800 nucleotides. In another embodiment, the length is at least 900 nucleotides. In another embodiment, the length is at least 1000 nucleotides. In another embodiment, the length is at least 1100 nucleotides. In another embodiment, the length is at least 1200 nucleotides. In another embodiment, the length is at least 1300 nucleotides. In another embodiment, the length is at least 1400 nucleotides. In another embodiment, the length is at least 1500 nucleotides. In another embodiment, the length is at least 1600 nucleotides. In another embodiment, the length is at least 1700 nucleotides. In another embodiment, the length is at least 1800 nucleotides. In another embodiment, the length is at least 1900 nucleotides. In another embodiment, the length is at least 2000 nucleotides. In another embodiment, the length is at least 2500 nucleotides. In another embodiment, the length is at least 3000 nucleotides.

[0273] In some embodiments, the nucleic acid or mRNA includes from about 30 to about 3,000 nucleotides (e.g., from 30 to 50, from 30 to 100, from 30 to 250, from 30 to 500, from 30 to 750, from 30 to 1,000, from 30 to 1,500, from 30 to 2,000, from 30 to 2,500, from 50 to 100, from 50 to 250, from 50 to 500, from 50 to 750, from 50 to 1,000, from 50 to 1,500, from 50 to 2,000, from 50 to 2,500, from 50 to 3,000, from 100 to 500, from 100 to 750, from 100 to 1,000, from 100 to 1,500, from 100 to 2,000, from 100 to 2,500, from 100 to 3,000, from 500 to 750, from 500 to 1,000, from 500 to 1,500, from 500 to 2,000, from 500 to 2,500, from 500 to 3,000, from 1,000 to 1,500, from 1,000 to 2,000, from 1,000 to 2,500, from 1,000 to 3,000, from 1,500 to 2,000, from 1,500 to 2,500, from 1,500 to 3,000, from 2,000 to 3,000, from 2,000 to 2,500, and from 2,500 to 3,000).

[0274] In one embodiment, the poly-A tail may be 80 nucleotides, 120 nucleotides, 160 nucleotides in length on a modified RNA molecule described herein such as, but not limited to, the polyA tail length on the modified RNA described in Example 13.

[0275] In another embodiment, the poly-A tail may be 20, 40, 80, 100, 120, 140 or 160 nucleotides in length on a modified RNA molecule described herein such as, but not limited to, the polyA tail length on the modified RNA described in Example 44.

[0276] In one embodiment, the poly-A tail is designed relative to the length of the overall modified RNA molecule. This design may be based on the length of the coding region of the modified RNA, the length of a particular feature or region of the modified RNA (such as the mRNA), or based on the length of the ultimate product expressed from the modified RNA. When relative to any additional feature of the modified RNA (e.g., other than the mRNA portion which includes the poly-A tail) the poly-A tail may be 10, 20, 30, 40, 50, 60, 70, 80, 90 or 100% greater in length than the additional feature. The poly-A tail may also be designed as a fraction of the modified RNA to which it belongs. In this context, the poly-A tail may be 10, 20, 30, 40, 50, 60, 70, 80, or 90% or more of the total length of the construct or the total length of the construct minus the poly-A tail.

[0277] In one embodiment, engineered binding sites and/or the conjugation of nucleic acids or mRNA for Poly-A binding protein may be used to enhance expression. The engineered binding sites may be sensor sequences which can operate as binding sites for ligands of the local microenvironment of the nucleic acids and/or mRNA. As a non-limiting example, the nucleic acids and/or mRNA may comprise at least one engineered binding site to alter the binding affinity of Poly-A binding protein (PABP) and analogs thereof. The incorporation of at least one engineered binding site may increase the binding affinity of the PABP and analogs thereof.

[0278] Additionally, multiple distinct nucleic acids or mRNA may be linked together to the PABP (Poly-A binding protein) through the 3′-end using modified nucleotides at the 3′-terminus of the poly-A tail. Transfection experiments can be conducted in relevant cell lines at and protein production can be assayed by ELISA at 12 hr, 24 hr, 48 hr, 72 hr and day 7 post-transfection. As a non-limiting example, the transfection experiments may be used to evaluate the effect on PABP or analogs thereof binding affinity as a result of the addition of at least one engineered binding site.

[0279] In one embodiment, a polyA tail may be used to modulate translation initiation. While not wishing to be bound by theory, the polyA til recruits PABP which in turn can interact with translation initiation complex and thus may be essential for protein synthesis.

[0280] In another embodiment, a polyA tail may also be used in the present invention to protect against 3′-5′ exonuclease digestion.

[0281] In one embodiment, the nucleic acids or mRNA of the present invention are designed to include a polyA-G Quartet. The G-quartet is a cyclic hydrogen bonded array of four guanine nucleotides that can be formed by G-rich sequences in both DNA and RNA. In this embodiment, the G-quartet is incorporated at the end of the poly-A tail. The resultant nucleic acid or mRNA may be assayed for stability, protein production and other parameters including half-life at various time points. It has been discovered that the polyA-G quartet results in protein production equivalent to at least 75% of that seen using a poly-A tail of 120 nucleotides alone.

[0282] In one embodiment, the nucleic acids or mRNA of the present invention may comprise a polyA tail and may be stabilized by the addition of a chain terminating nucleoside. The nucleic acids and/or mRNA with a polyA tail may further comprise a 5′cap structure.

[0283] In another embodiment, the nucleic acids or mRNA of the present invention may comprise a polyA-G Quartet. The nucleic acids and/or mRNA with a polyA-G Quartet may further comprise a 5′cap structure.

[0284] In one embodiment, the chain terminating nucleoside which may be used to stabilize the nucleic acid or mRNA comprising a polyA tail or polyA-G Quartet may be, but is not limited to, those described in International Patent Publication No. WO2013103659, herein incorporated by reference in its entirety. In another embodiment, the chain terminating nucleosides which may be used with the present invention includes, but is not limited to, 3′-deoxyadenosine (cordycepin), 3′-deoxyuridine, 3′-deoxycytosine, 3′-deoxyguanosine, 3′-deoxythymine, 2′,3′-dideoxynucleosides, such as 2′,3′-dideoxyadenosine, 2′,3′-dideoxyuridine, 2′,3′-dideoxycytosine, 2′,3′-dideoxyguanosine, 2′,3′-dideoxythymine, a 2′-deoxynucleoside, or a —O— methylnucleoside.

[0285] In another embodiment, the nucleic acid such as, but not limited to mRNA, which comprise a polyA tail or a polyA-G Quartet may be stabilized by a modification to the 3′region of the nucleic acid that can prevent and/or inhibit the addition of oligio(U) (see e.g., International Patent Publication No. WO2013103659, herein incorporated by reference in its entirety).

[0286] In yet another embodiment, the nucleic acid such as, but not limited to mRNA, which comprise a polyA tail or a polyA-G Quartet may be stabilized by the addition of an oligonucleotide that terminates in a 3′-deoxynucleoside, 2′,3′-dideoxynucleoside 3′-0-methylnucleosides, 3′-0-ethylnucleosides. 3′-arabinosides, and other modified nucleosides known in the art and/or described herein.

### Quantification

[0287] In one embodiment, the polynucleotides, primary constructs, modified nucleic acids or mmRNA of the present invention may be quantified in exosomes derived from one or more bodily fluid. As used herein “bodily fluids” include peripheral blood, serum, plasma, ascites, urine, cerebrospinal fluid (CSF), sputum, saliva, bone marrow, synovial fluid, aqueous humor, amniotic fluid, cerumen, breast milk, broncheoalveolar lavage fluid, semen, prostatic fluid, cowper's fluid or pre-ejaculatory fluid, sweat, fecal matter, hair, tears, cyst fluid, pleural and peritoneal fluid, pericardial fluid, lymph, chyme, chyle, bile, interstitial fluid, menses, pus, sebum, vomit, vaginal secretions, mucosal secretion, stool water, pancreatic juice, lavage fluids from sinus cavities, bronchopulmonary aspirates, blastocyl cavity fluid, and umbilical cord blood. Alternatively, exosomes may be retrieved from an organ selected from the group consisting of lung, heart, pancreas, stomach, intestine, bladder, kidney, ovary, testis, skin, colon, breast, prostate, brain, esophagus, liver, and placenta.

[0288] In the quantification method, a sample of not more than 2 mL is obtained from the subject and the exosomes isolated by size exclusion chromatography, density gradient centrifugation, differential centrifugation, nanomembrane ultrafiltration, immunoabsorbent capture, affinity purification, microfluidic separation, or combinations thereof. In the analysis, the level or concentration of the polynucleotides, primary construct, modified nucleic acid or mmRNA may be an expression level, presence, absence, truncation or alteration of the administered construct. It is advantageous to correlate the level with one or more clinical phenotypes or with an assay for a human disease biomarker. The assay may be performed using construct specific probes, cytometry, qRT-PCR, real-time PCR, PCR, flow cytometry, electrophoresis, mass spectrometry, or combinations thereof while the exosomes may be isolated using immunohistochemical methods such as enzyme linked immunosorbent assay (ELISA) methods. Exosomes may also be isolated by size exclusion chromatography, density gradient centrifugation, differential centrifugation, nanomembrane ultrafiltration, immunoabsorbent capture, affinity purification, microfluidic separation, or combinations thereof.

[0289] These methods afford the investigator the ability to monitor, in real time, the level of the polynucleotides, primary constructs, modified nucleic acid or mmRNA remaining or delivered. This is possible because the polynucleotides, primary constructs, modified nucleic acid or mmRNA of the present invention differ from the endogenous forms due to the structural and/or chemical modifications.

### II. Design and Synthesis of Polynucleotides

[0290] Polynucleotides, primary constructs modified nucleic acids or mmRNA for use in accordance with the invention may be prepared according to any available technique including, but not limited to chemical synthesis, enzymatic synthesis, which is generally termed in vitro transcription (IVT) or enzymatic or chemical cleavage of a longer precursor, etc. Methods of synthesizing RNAs are known in the art (see, e.g., Gait, M. J. (ed.) Oligonucleotide synthesis: a practical approach, Oxford [Oxfordshire], Washington, DC: IRL Press, 1984; and Herdewijn, P. (ed.) Oligonucleotide synthesis: methods and applications, Methods in Molecular Biology, v. 288 (Clifton, N.J.) Totowa, N.J.: Humana Press, 2005; both of which are incorporated herein by reference).

[0291] The process of design and synthesis of the primary constructs of the invention generally includes the steps of gene construction, mRNA production (either with or without modifications) and purification. In the enzymatic synthesis method, a target polynucleotide sequence encoding the polypeptide of interest is first selected for incorporation into a vector which will be amplified to produce a cDNA template. Optionally, the target polynucleotide sequence and/or any flanking sequences may be codon optimized. The cDNA template is then used to produce mRNA through in vitro transcription (IVT). After production, the mRNA may undergo purification and clean-up processes. The steps of which are provided in more detail below.

### Gene Construction

[0292] The step of gene construction may include, but is not limited to gene synthesis, vector amplification, plasmid purification, plasmid linearization and clean-up, and cDNA template synthesis and clean-up.

### Gene Synthesis

[0293] Once a polypeptide of interest, or target, is selected for production, a primary construct is designed. Within the primary construct, a first region of linked nucleosides encoding the polypeptide of interest may be constructed using an open reading frame (ORF) of a selected nucleic acid (DNA or RNA) transcript. The ORF may comprise the wild type ORF, an isoform, variant or a fragment thereof. As used herein, an “open reading frame” or “ORF” is meant to refer to a nucleic acid sequence (DNA or RNA) which is capable of encoding a polypeptide of interest. ORFs often begin with the start codon, ATG and end with a nonsense or termination codon or signal.

[0294] Further, the nucleotide sequence of the first region may be codon optimized. Codon optimization methods are known in the art and may be useful in efforts to achieve one or more of several goals. These goals include to match codon frequencies in target and host organisms to ensure proper folding, bias GC content to increase mRNA stability or reduce secondary structures, minimize tandem repeat codons or base runs that may impair gene construction or expression, customize transcriptional and translational control regions, insert or remove protein trafficking sequences, remove/add post translation modification sites in encoded protein (e.g. glycosylation sites), add, remove or shuffle protein domains, insert or delete restriction sites, modify ribosome binding sites and mRNA degradation sites, to adjust translational rates to allow the various domains of the protein to fold properly, or to reduce or eliminate problem secondary structures within the mRNA. Codon optimization tools, algorithms and services are known in the art, non-limiting examples include services from GeneArt (Life Technologies) and/or DNA2.0 (Menlo Park CA). In one embodiment, the ORF sequence is optimized using optimization algorithms. Codon options for each amino acid are given in Table 5.

TABLE 5
Codon Options

| | Single | |
|---|---|---|
| | Letter | |
| Amino Acid | Code | Codon Options |
| Isoleucine | I | ATT, ATC, ATA |
| Leucine | L | CTT, CTC, CTA, CTG, TTA, TTG |
| Valine | V | GTT, GTC, GTA, GTG |
| Phenylalanine | F | TTT, TTC |
| Methionine | M | ATG |
| Cysteine | C | TGT, TGC |
| Alanine | A | GCT, GCC, GCA, GCG |
| Glycine | G | GGT, GGC, GGA, GGG |
| Proline | P | CCT, CCC, CCA, CCG |
| Threonine | T | ACT, ACC, ACA, ACG |
| Serine | S | TCT, TCC, TCA, TCG, AGT, AGC |
| Tyrosine | Y | TAT, TAC |
| Tryptophan | W | TGG |
| Glutamine | Q | CAA, CAG |
| Asparagine | N | AAT, AAC |
| Histidine | H | CAT, CAC |
| Glutamic acid | E | GAA, GAG |
| Aspartic acid | D | GAT, GAC |
| Lysine | K | AAA, AAG |
| Arginine | R | CGT, CGC, CGA, CGG, AGA, AGG |
| Selenocysteine | Sec | UGA in mRNA in presence |
| | | of Selenocystein insertion |
| | | element (SECIS) |
| Stop codons | Stop | TAA, TAG, TGA |

[0295] In one embodiment, after a nucleotide sequence has been codon optimized it may be further evaluated for regions containing restriction sites. At least one nucleotide within the restriction site regions may be replaced with another nucleotide in order to remove the restriction site from the sequence but the replacement of nucleotides does alter the amino acid sequence which is encoded by the codon optimized nucleotide sequence.

[0296] Features, which may be considered beneficial in some embodiments of the present invention, may be encoded by the primary construct and may flank the ORF as a first or second flanking region. The flanking regions may be incorporated into the primary construct before and/or after optimization of the ORF. It is not required that a primary construct contain both a 5′ and 3′ flanking region. Examples of such features include, but are not limited to, untranslated regions (UTRs), Kozak sequences, an oligo(dT) sequence, and detectable tags and may include multiple cloning sites which may have XbaI recognition.

[0297] In some embodiments, a 5′ UTR and/or a 3′ UTR may be provided as flanking regions. Multiple 5′ or 3′ UTRs may be included in the flanking regions and may be the same or of different sequences. Any portion of the flanking regions, including none, may be codon optimized and any may independently contain one or more different structural or chemical modifications, before and/or after codon optimization. Combinations of features may be included in the first and second flanking regions and may be contained within other features. For example, the ORF may be flanked by a 5′ UTR which may contain a strong Kozak translational initiation signal and/or a 3′ UTR which may include an oligo(dT) sequence for templated addition of a poly-A tail.

[0298] Tables 2 and 3 provide a listing of exemplary UTRs which may be utilized in the primary construct of the present invention as flanking regions. Shown in Table 6 is a representative listing of a 5′-untranslated region of the invention. Variants of 5′ UTRs may be utilized wherein one or more nucleotides are added or removed to the termini, including A, T, C or G.

TABLE 6
5′-Untranslated Regions

| 5′ UTR | Name/ | | SEQ ID |
|---|---|---|---|
| Identifier | Description | Sequence | NO. |
| Native | Wild type | See wild type sequence | — |
| | UTR | | |
| 5UTR-001 | Synthetic | GGGAAATAAGAGAGAAAAGAAGAGTAAG | 5 |
| | UTR | AAGAAATATAAGAGCCACC | |
| 5UTR-002 | Upstream | GGGAGATCAGAGAGAAAAGAAGAGTAAGA | 6 |
| | UTR | AGAAATATAAGAGCCACC | |
| 5UTR-003 | Upstream | GGAATAAAAGTCTCAACACAACATATACA | 7 |
| | UTR | AAACAAACGAATCTCAAGCAATCAAGCAT | |
| | | TCTACTTCTATTGCAGCAATTTAAATCATTT | |
| | | CTTTTAAAGCAAAAGCAATTTTCTGAAAAT | |
| | | TTTCACCATTTACGAACGATAGCAAC | |
| 5UTR-004 | Upstream | GGGAGACAAGCUUGGCAUUCCGGUACUGU | 8 |
| | UTR | UGGUAAAGCCACC | |

[0299] In another embodiment, the 5′ UTR may comprise a first polynucleotide fragment and a second polynucleotide fragment where the first and second fragments may be from the same or different gene. (See e.g., US20100293625 and US20110247090, each of which is herein incorporated by reference in its entirety). As a non-limiting example, the first polynucleotide may be a fragment of the canine, human or mouse SERCA2 gene and/or the second polynucleotide fragment is a fragment of the bovine, mouse, rat or sheep beta-casein gene.

[0300] In one embodiment, the first polynucleotide fragment may be located on the 5′ end of the second polynucleotide fragment. (See e.g., US20100293625 and US20110247090, each of which is herein incorporated by reference in its entirety).

[0301] In another embodiment, the first polynucleotide fragment may comprise the second intron of a sarcoplasmic/endoplasmic reticulum calcium ATPase gene and/or the second polynucleotide fragment comprises at least a portion of the 5′ UTR of a eukaryotic casein gene. (See e.g., US20100293625 and US20110247090, each of which is herein incorporated by reference in its entirety). The first polynucleotide fragment may also comprise at least a portion of exon 2 and/or exon 3 of the sarcoplasmic/endoplasmic reticulum calcium ATPase gene. (See e.g., US20100293625 and US20110247090, each of which is herein incorporated by reference in its entirety).

[0302] Shown in Table 7 is a representative listing of 3′-untranslated regions of the invention. Variants of 3′ UTRs may be utilized wherein one or more nucleotides are added or removed to the termini, including A, T, C or G.

TABLE 7
3′-Untranslated Regions

| | | | SEQ |
|---|---|---|---|
| 3′ UTR | Name/ | | ID |
| Identifier | Description | Sequence | NO. |
| 3UTR-001 | Creatine | GCGCCTGCCCACCTGCCACCGACTGCTGGAAC | 9 |
| | Kinase | CCAGCCAGTGGGAGGGCCTGGCCCACCAGAGT | |
| | | CCTGCTCCCTCACTCCTCGCCCCGCCCCCTGTC | |
| | | CCAGAGTCCCACCTGGGGGCTCTCTCCACCCTT | |
| | | CTCAGAGTTCCAGTTTCAACCAGAGTTCCAACC | |
| | | AATGGGCTCCATCCTCTGGATTCTGGCCAATGA | |
| | | AATATCTCCCTGGCAGGGTCCTCTTCTTTTCCC | |
| | | AGAGCTCCACCCCAACCAGGAGCTCTAGTTAA | |
| | | TGGAGAGCTCCCAGCACACTCGGAGCTTGTGC | |
| | | TTTGTCTCCACGCAAAGCGATAAATAAAAGCA | |
| | | TTGGTGGCCTTTGGTCTTTGAATAAAGCCTGAG | |
| | | TAGGAAGTCTAGA | |
| 3UTR-002 | Myoglobin | GCCCCTGCCGCTCCCACCCCCACCCATCTGGGC | 10 |
| | | CCCGGGTTCAAGAGAGAGCGGGGTCTGATCTC | |
| | | GTGTAGCCATATAGAGTTTGCTTCTGAGTGTCT | |
| | | GCTTTGTTTAGTAGAGGTGGGCAGGAGGAGCT | |
| | | GAGGGGCTGGGGCTGGGGTGTTGAAGTTGGCT | |
| | | TTGCATGCCCAGCGATGCGCCTCCCTGTGGGAT | |
| | | GTCATCACCCTGGGAACCGGGAGTGGCCCTTG | |
| | | GCTCACTGTGTTCTGCATGGTTTGGATCTGAAT | |
| | | TAATTGTCCTTTCTTCTAAATCCCAACCGAACT | |
| | | TCTTCCAACCTCCAAACTGGCTGTAACCCCAAA | |
| | | TCCAAGCCATTAACTACACCTGACAGTAGCAA | |
| | | TTGTCTGATTAATCACTGGCCCCTTGAAGACAG | |
| | | CAGAATGTCCCTTTGCAATGAGGAGGAGATCT | |
| | | GGGCTGGGCGGGCCAGCTGGGGAAGCATTTGA | |
| | | CTATCTGGAACTTGTGTGTGCCTCCTCAGGTAT | |
| | | GGCAGTGACTCACCTGGTTTTAATAAAACAAC | |
| | | CTGCAACATCTCATGGTCTTTGAATAAAGCCTG | |
| | | AGTAGGAAGTCTAGA | |
| 3UTR-003 | α-actin | ACACACTCCACCTCCAGCACGCGACTTCTCAG | 11 |
| | | GACGACGAATCTTCTCAATGGGGGGGCGGCTG | |
| | | AGCTCCAGCCACCCCGCAGTCACTTTCTTTGTA | |
| | | ACAACTTCCGTTGCTGCCATCGTAAACTGACAC | |
| | | AGTGTTTATAACGTGTACATACATTAACTTATT | |
| | | ACCTCATTTTGTTATTTTTCGAAACAAAGCCCT | |
| | | GTGGAAGAAAATGGAAAACTTGAAGAAGCATT | |
| | | AAAGTCATTCTGTTAAGCTGCGTAAATGGTCTT | |
| | | TGAATAAAGCCTGAGTAGGAAGTCTAGA | |
| 3UTR-004 | Albumin | CATCACATTTAAAAGCATCTCAGCCTACCATG | 12 |
| | | AGAATAAGAGAAAGAAAATGAAGATCAAAAG | |
| | | CTTATTCATCTGTTTTTCTTTTTCGTTGGTGTAA | |
| | | AGCCAACACCCTGTCTAAAAAACATAAATTTC | |
| | | TTTAATCATTTTGCCTCTTTTCTCTGTGCTTCAA | |
| | | TTAATAAAAAATGGAAAGAATCTAATAGAGTG | |
| | | GTACAGCACTGTTATTTTTCAAAGATGTGTTGC | |
| | | TATCCTGAAAATTCTGTAGGTTCTGTGGAAGTT | |
| | | CCAGTGTTCTCTCTTATTCCACTTCGGTAGAGG | |
| | | ATTTCTAGTTTCTTGTGGGCTAATTAAATAAAT | |
| | | CATTAATACTCTTCTAATGGTCTTTGAATAAAG | |
| | | CCTGAGTAGGAAGTCTAGA | |
| 3UTR-005 | α-globin | GCTGCCTTCTGCGGGGCTTGCCTTCTGGCCATG | 13 |
| | | CCCTTCTTCTCTCCCTTGCACCTGTACCTCTTGG | |
| | | TCTTTGAATAAAGCCTGAGTAGGAAGGCGGCC | |
| | | GCTCGAGCATGCATCTAGA | |
| 3UTR-006 | G-CSF | GCCAAGCCCTCCCCATCCCATGTATTTATCTCT | 14 |
| | | ATTTAATATTTATGTCTATTTAAGCCTCATATTT | |
| | | AAAGACAGGGAAGAGCAGAACGGAGCCCCAG | |
| | | GCCTCTGTGTCCTTCCCTGCATTTCTGAGTTTC | |
| | | ATTCTCCTGCCTGTAGCAGTGAGAAAAAGCTC | |
| | | CTGTCCTCCCATCCCCTGGACTGGGAGGTAGAT | |
| | | AGGTAAATACCAAGTATTTATTACTATGACTGC | |
| | | TCCCCAGCCCTGGCTCTGCAATGGGCACTGGG | |
| | | ATGAGCCGCTGTGAGCCCCTGGTCCTGAGGGT | |
| | | CCCCACCTGGGACCCTTGAGAGTATCAGGTCT | |
| | | CCCACGTGGGAGACAAGAAATCCCTGTTTAAT | |
| | | ATTTAAACAGCAGTGTTCCCCATCTGGGTCCTT | |
| | | GCACCCCTCACTCTGGCCTCAGCCGACTGCAC | |
| | | AGCGGCCCCTGCATCCCCTTGGCTGTGAGGCC | |
| | | CCTGGACAAGCAGAGGTGGCCAGAGCTGGGA | |
| | | GGCATGGCCCTGGGGTCCCACGAATTTGCTGG | |
| | | GGAATCTCGTTTTTCTTCTTAAGACTTTTGGGA | |
| | | CATGGTTTGACTCCCGAACATCACCGACGCGT | |
| | | CTCCTGTTTTTCTGGGTGGCCTCGGGACACCTG | |
| | | CCCTGCCCCCACGAGGGTCAGGACTGTGACTC | |
| | | TTTTTAGGGCCAGGCAGGTGCCTGGACATTTGC | |
| | | CTTGCTGGACGGGGACTGGGGATGTGGGAGGG | |
| | | AGCAGACAGGAGGAATCATGTCAGGCCTGTGT | |
| | | GTGAAAGGAAGCTCCACTGTCACCCTCCACCT | |
| | | CTTCACCCCCCACTCACCAGTGTCCCCTCCACT | |
| | | GTCACATTGTAACTGAACTTCAGGATAATAAA | |
| | | GTGTTTGCCTCCATGGTCTTTGAATAAAGCCTG | |
| | | AGTAGGAAGGCGGCCGCTCGAGCATGCATCTA | |
| | | GA | |
| 3UTR-007 | Col1a2; | ACTCAATCTAAATTAAAAAAGAAAGAAATTTG | 15 |
| | collagen, | AAAAAACTTTCTCTTTGCCATTTCTTCTTCTTCT | |
| | type I, | TTTTTAACTGAAAGCTGAATCCTTCCATTTCTT | |
| | alpha 2 | CTGCACATCTACTTGCTTAAATTGTGGGCAAAA | |
| | | GAGAAAAAGAAGGATTGATCAGAGCATTGTGC | |
| | | AATACAGTTTCATTAACTCCTTCCCCCGCTCCC | |
| | | CCAAAAATTTGAATTTTTTTTTCAACACTCTTA | |
| | | CACCTGTTATGGAAAATGTCAACCTTTGTAAG | |
| | | AAAACCAAAATAAAAATTGAAAAATAAAAAC | |
| | | CATAAACATTTGCACCACTTGTGGCTTTTGAAT | |
| | | ATCTTCCACAGAGGGAAGTTTAAAACCCAAAC | |
| | | TTCCAAAGGTTTAAACTACCTCAAAACACTTTC | |
| | | CCATGAGTGTGATCCACATTGTTAGGTGCTGAC | |
| | | CTAGACAGAGATGAACTGAGGTCCTTGTTTTGT | |
| | | TTTGTTCATAATACAAAGGTGCTAATTAATAGT | |
| | | ATTTCAGATACTTGAAGAATGTTGATGGTGCTA | |
| | | GAAGAATTTGAGAAGAAATACTCCTGTATTGA | |
| | | GTTGTATCGTGTGGTGTATTTTTTAAAAAATTT | |
| | | GATTTAGCATTCATATTTTCCATCTTATTCCCA | |
| | | ATTAAAAGTATGCAGATTATTTGCCCAAATCTT | |
| | | CTTCAGATTCAGCATTTGTTCTTTGCCAGTCTC | |
| | | ATTTTCATCTTCTTCCATGGTTCCACAGAAGCT | |
| | | TTGTTTCTTGGGCAAGCAGAAAAATTAAATTGT | |
| | | ACCTATTTTGTATATGTGAGATGTTTAAATAAA | |
| | | TTGTGAAAAAAATGAAATAAAGCATGTTTGGT | |
| | | TTTCCAAAAGAACATAT | |
| 3UTR-008 | Col6a2; | CGCCGCCGCCCGGGCCCCGCAGTCGAGGGTCG | 16 |
| | collagen, | TGAGCCCACCCCGTCCATGGTGCTAAGCGGGC | |
| | type VI, | CCGGGTCCCACACGGCCAGCACCGCTGCTCAC | |
| | alpha 2 | TCGGACGACGCCCTGGGCCTGCACCTCTCCAG | |
| | | CTCCTCCCACGGGGTCCCCGTAGCCCCGGCCC | |
| | | CCGCCCAGCCCCAGGTCTCCCCAGGCCCTCCG | |
| | | CAGGCTGCCCGGCCTCCCTCCCCCTGCAGCCAT | |
| | | CCCAAGGCTCCTGACCTACCTGGCCCCTGAGCT | |
| | | CTGGAGCAAGCCCTGACCCAATAAAGGCTTTG | |
| | | AACCCAT | |
| 3UTR-009 | RPN1; | GGGGCTAGAGCCCTCTCCGCACAGCGTGGAGA | 17 |
| | ribophorin I | CGGGGCAAGGAGGGGGGTTATTAGGATTGGTG | |
| | | GTTTTGTTTTGCTTTGTTTAAAGCCGTGGGAAA | |
| | | ATGGCACAACTTTACCTCTGTGGGAGATGCAA | |
| | | CACTGAGAGCCAAGGGGTGGGAGTTGGGATAA | |
| | | TTTTTATATAAAAGAAGTTTTTCCACTTTGAAT | |
| | | TGCTAAAAGTGGCATTTTTCCTATGTGCAGTCA | |
| | | CTCCTCTCATTTCTAAAATAGGGACGTGGCCAG | |
| | | GCACGGTGGCTCATGCCTGTAATCCCAGCACTT | |
| | | TGGGAGGCCGAGGCAGGCGGCTCACGAGGTCA | |
| | | GGAGATCGAGACTATCCTGGCTAACACGGTAA | |
| | | AACCCTGTCTCTACTAAAAGTACAAAAAATTA | |
| | | GCTGGGCGTGGTGGTGGGCACCTGTAGTCCCA | |
| | | GCTACTCGGGAGGCTGAGGCAGGAGAAAGGC | |
| | | ATGAATCCAAGAGGCAGAGCTTGCAGTGAGCT | |
| | | GAGATCACGCCATTGCACTCCAGCCTGGGCAA | |
| | | CAGTGTTAAGACTCTGTCTCAAATATAAATAA | |
| | | ATAAATAAATAAATAAATAAATAAATAAAAAT | |
| | | AAAGCGAGATGTTGCCCTCAAA | |
| 3UTR-010 | LRP1; low | GGCCCTGCCCCGTCGGACTGCCCCCAGAAAGC | 18 |
| | density | CTCCTGCCCCCTGCCAGTGAAGTCCTTCAGTGA | |
| | lipoprotein | GCCCCTCCCCAGCCAGCCCTTCCCTGGCCCCGC | |
| | receptor- | CGGATGTATAAATGTAAAAATGAAGGAATTAC | |
| | related | ATTTTATATGTGAGCGAGCAAGCCGGCAAGCG | |
| | protein 1 | AGCACAGTATTATTTCTCCATCCCCTCCCTGCC | |
| | | TGCTCCTTGGCACCCCCATGCTGCCTTCAGGGA | |
| | | GACAGGCAGGGAGGGCTTGGGGCTGCACCTCC | |
| | | TACCCTCCCACCAGAACGCACCCCACTGGGAG | |
| | | AGCTGGTGGTGCAGCCTTCCCCTCCCTGTATAA | |
| | | GACACTTTGCCAAGGCTCTCCCCTCTCGCCCCA | |
| | | TCCCTGCTTGCCCGCTCCCACAGCTTCCTGAGG | |
| | | GCTAATTCTGGGAAGGGAGAGTTCTTTGCTGC | |
| | | CCCTGTCTGGAAGACGTGGCTCTGGGTGAGGT | |
| | | AGGCGGGAAAGGATGGAGTGTTTTAGTTCTTG | |
| | | GGGGAGGCCACCCCAAACCCCAGCCCCAACTC | |
| | | CAGGGGCACCTATGAGATGGCCATGCTCAACC | |
| | | CCCCTCCCAGACAGGCCCTCCCTGTCTCCAGG | |
| | | GCCCCCACCGAGGTTCCCAGGGCTGGAGACTT | |
| | | CCTCTGGTAAACATTCCTCCAGCCTCCCCTCCC | |
| | | CTGGGGACGCCAAGGAGGTGGGCCACACCCAG | |
| | | GAAGGGAAAGCGGGCAGCCCCGTTTTGGGGAC | |
| | | GTGAACGTTTTAATAATTTTTGCTGAATTCCTT | |
| | | TACAACTAAATAACACAGATATTGTTATAAAT | |
| | | AAAATTGT | |
| 3UTR-011 | Nnt1; | ATATTAAGGATCAAGCTGTTAGCTAATAATGC | 19 |
| | cardiotrophin- | CACCTCTGCAGTTTTGGGAACAGGCAAATAAA | |
| | like | GTATCAGTATACATGGTGATGTACATCTGTAGC | |
| | cytokine | AAAGCTCTTGGAGAAAATGAAGACTGAAGAA | |
| | factor 1 | AGCAAAGCAAAAACTGTATAGAGAGATTTTTC | |
| | | AAAAGCAGTAATCCCTCAATTTTAAAAAAGGA | |
| | | TTGAAAATTCTAAATGTCTTTCTGTGCATATTT | |
| | | TTTGTGTTAGGAATCAAAAGTATTTTATAAAAG | |
| | | GAGAAAGAACAGCCTCATTTTAGATGTAGTCC | |
| | | TGTTGGATTTTTTATGCCTCCTCAGTAACCAGA | |
| | | AATGTTTTAAAAAACTAAGTGTTTAGGATTTCA | |
| | | AGACAACATTATACATGGCTCTGAAATATCTG | |
| | | ACACAATGTAAACATTGCAGGCACCTGCATTT | |
| | | TATGTTTTTTTTTTCAACAAATGTGACTAATTT | |
| | | GAAACTTTTATGAACTTCTGAGCTGTCCCCTTG | |
| | | CAATTCAACCGCAGTTTGAATTAATCATATCAA | |
| | | ATCAGTTTTAATTTTTTAAATTGTACTTCAGAG | |
| | | TCTATATTTCAAGGGCACATTTTCTCACTACTA | |
| | | TTTTAATACATTAAAGGACTAAATAATCTTTCA | |
| | | GAGATGCTGGAAACAAATCATTTGCTTTATAT | |
| | | GTTTCATTAGAATACCAATGAAACATACAACT | |
| | | TGAAAATTAGTAATAGTATTTTTGAAGATCCCA | |
| | | TTTCTAATTGGAGATCTCTTTAATTTCGATCAA | |
| | | CTTATAATGTGTAGTACTATATTAAGTGCACTT | |
| | | GAGTGGAATTCAACATTTGACTAATAAAATGA | |
| | | GTTCATCATGTTGGCAAGTGATGTGGCAATTAT | |
| | | CTCTGGTGACAAAAGAGTAAAATCAAATATTT | |
| | | CTGCCTGTTACAAATATCAAGGAAGACCTGCT | |
| | | ACTATGAAATAGATGACATTAATCTGTCTTCAC | |
| | | TGTTTATAATACGGATGGATTTTTTTTCAAATC | |
| | | AGTGTGTGTTTTGAGGTCTTATGTAATTGATGA | |
| | | CATTTGAGAGAAATGGTGGCTTTTTTTAGCTAC | |
| | | CTCTTTGTTCATTTAAGCACCAGTAAAGATCAT | |
| | | GTCTTTTTATAGAAGTGTAGATTTTCTTTGTGA | |
| | | CTTTGCTATCGTGCCTAAAGCTCTAAATATAGG | |
| | | TGAATGTGTGATGAATACTCAGATTATTTGTCT | |
| | | CTCTATATAATTAGTTTGGTACTAAGTTTCTCA | |
| | | AAAAATTATTAACACATGAAAGACAATCTCTA | |
| | | AACCAGAAAAAGAAGTAGTACAAATTTTGTTA | |
| | | CTGTAATGCTCGCGTTTAGTGAGTTTAAAACAC | |
| | | ACAGTATCTTTTGGTTTTATAATCAGTTTCTATT | |
| | | TTGCTGTGCCTGAGATTAAGATCTGTGTATGTG | |
| | | TGTGTGTGTGTGTGTGCGTTTGTGTGTTAAAGC | |
| | | AGAAAAGACTTTTTTAAAAGTTTTAAGTGATA | |
| | | AATGCAATTTGTTAATTGATCTTAGATCACTAG | |
| | | TAAACTCAGGGCTGAATTATACCATGTATATTC | |
| | | TATTAGAAGAAAGTAAACACCATCTTTATTCCT | |
| | | GCCCTTTTTCTTCTCTCAAAGTAGTTGTAGTTA | |
| | | TATCTAGAAAGAAGCAATTTTGATTTCTTGAAA | |
| | | AGGTAGTTCCTGCACTCAGTTTAAACTAAAAA | |
| | | TAATCATACTTGGATTTTATTTATTTTTGTCATA | |
| | | GTAAAAATTTTAATTTATATATATTTTTATTTA | |
| | | GTATTATCTTATTCTTTGCTATTTGCCAATCCTT | |
| | | TGTCATCAATTGTGTTAAATGAATTGAAAATTC | |
| | | ATGCCCTGTTCATTTTATTTTACTTTATTGGTTA | |
| | | GGATATTTAAAGGATTTTTGTATATATAATTTC | |
| | | TTAAATTAATATTCCAAAAGGTTAGTGGACTTA | |
| | | GATTATAAATTATGGCAAAAATCTAAAAACAA | |
| | | CAAAAATGATTTTTATACATTCTATTTCATTAT | |
| | | TCCTCTTTTTCCAATAAGTCATACAATTGGTAG | |
| | | ATATGACTTATTTTATTTTTGTATTATTCACTAT | |
| | | ATCTTTATGATATTTAAGTATAAATAATTAAAA | |
| | | AAATTTATTGTACCTTATAGTCTGTCACCAAAA | |
| | | AAAAAAAATTATCTGTAGGTAGTGAAATGCTA | |
| | | ATGTTGATTTGTCTTTAAGGGCTTGTTAACTAT | |
| | | CCTTTATTTTCTCATTTGTCTTAAATTAGGAGTT | |
| | | TGTGTTTAAATTACTCATCTAAGCAAAAAATGT | |
| | | ATATAAATCCCATTACTGGGTATATACCCAAA | |
| | | GGATTATAAATCATGCTGCTATAAAGACACAT | |
| | | GCACACGTATGTTTATTGCAGCACTATTCACAA | |
| | | TAGCAAAGACTTGGAACCAACCCAAATGTCCA | |
| | | TCAATGATAGACTTGATTAAGAAAATGTGCAC | |
| | | ATATACACCATGGAATACTATGCAGCCATAAA | |
| | | AAAGGATGAGTTCATGTCCTTTGTAGGGACAT | |
| | | GGATAAAGCTGGAAACCATCATTCTGAGCAAA | |
| | | CTATTGCAAGGACAGAAAACCAAACACTGCAT | |
| | | GTTCTCACTCATAGGTGGGAATTGAACAATGA | |
| | | GAACACTTGGACACAAGGTGGGGAACACCACA | |
| | | CACCAGGGCCTGTCATGGGGTGGGGGGAGTGG | |
| | | GGAGGGATAGCATTAGGAGATATACCTAATGT | |
| | | AAATGATGAGTTAATGGGTGCAGCACACCAAC | |
| | | ATGGCACATGTATACATATGTAGCAAACCTGC | |
| | | ACGTTGTGCACATGTACCCTAGAACTTAAAGT | |
| | | ATAATTAAAAAAAAAAAGAAAACAGAAGCTA | |
| | | TTTATAAAGAAGTTATTTGCTGAAATAAATGTG | |
| | | ATCTTTCCCATTAAAAAAATAAAGAAATTTTG | |
| | | GGGTAAAAAAACACAATATATTGTATTCTTGA | |
| | | AAAATTCTAAGAGAGTGGATGTGAAGTGTTCT | |
| | | CACCACAAAAGTGATAACTAATTGAGGTAATG | |
| | | CACATATTAATTAGAAAGATTTTGTCATTCCAC | |
| | | AATGTATATATACTTAAAAATATGTTATACACA | |
| | | ATAAATACATACATTAAAAAATAAGTAAATGTA | |
| 3UTR-012 | Col6a1; | CCCACCCTGCACGCCGGCACCAAACCCTGTCC | 20 |
| | collagen, | TCCCACCCCTCCCCACTCATCACTAAACAGAGT | |
| | type VI, | AAAATGTGATGCGAATTTTCCCGACCAACCTG | |
| | alpha 1 | ATTCGCTAGATTTTTTTTAAGGAAAAGCTTGGA | |
| | | AAGCCAGGACACAACGCTGCTGCCTGCTTTGT | |
| | | GCAGGGTCCTCCGGGGCTCAGCCCTGAGTTGG | |
| | | CATCACCTGCGCAGGGCCCTCTGGGGCTCAGC | |
| | | CCTGAGCTAGTGTCACCTGCACAGGGCCCTCT | |
| | | GAGGCTCAGCCCTGAGCTGGCGTCACCTGTGC | |
| | | AGGGCCCTCTGGGGCTCAGCCCTGAGCTGGCC | |
| | | TCACCTGGGTTCCCCACCCCGGGCTCTCCTGCC | |
| | | CTGCCCTCCTGCCCGCCCTCCCTCCTGCCTGCG | |
| | | CAGCTCCTTCCCTAGGCACCTCTGTGCTGCATC | |
| | | CCACCAGCCTGAGCAAGACGCCCTCTCGGGGC | |
| | | CTGTGCCGCACTAGCCTCCCTCTCCTCTGTCCC | |
| | | CATAGCTGGTTTTTCCCACCAATCCTCACCTAA | |
| | | CAGTTACTTTACAATTAAACTCAAAGCAAGCT | |
| | | CTTCTCCTCAGCTTGGGGCAGCCATTGGCCTCT | |
| | | GTCTCGTTTTGGGAAACCAAGGTCAGGAGGCC | |
| | | GTTGCAGACATAAATCTCGGCGACTCGGCCCC | |
| | | GTCTCCTGAGGGTCCTGCTGGTGACCGGCCTG | |
| | | GACCTTGGCCCTACAGCCCTGGAGGCCGCTGC | |
| | | TGACCAGCACTGACCCCGACCTCAGAGAGTAC | |
| | | TCGCAGGGGCGCTGGCTGCACTCAAGACCCTC | |
| | | GAGATTAACGGTGCTAACCCCGTCTGCTCCTCC | |
| | | CTCCCGCAGAGACTGGGGCCTGGACTGGACAT | |
| | | GAGAGCCCCTTGGTGCCACAGAGGGCTGTGTC | |
| | | TTACTAGAAACAACGCAAACCTCTCCTTCCTCA | |
| | | GAATAGTGATGTGTTCGACGTTTTATCAAAGG | |
| | | CCCCCTTTCTATGTTCATGTTAGTTTTGCTCCTT | |
| | | CTGTGTTTTTTTCTGAACCATATCCATGTTGCT | |
| | | GACTTTTCCAAATAAAGGTTTTCACTCCTCTC | |
| 3UTR-013 | Calr; | AGAGGCCTGCCTCCAGGGCTGGACTGAGGCCT | 21 |
| | calreticulin | GAGCGCTCCTGCCGCAGAGCTGGCCGCGCCAA | |
| | | ATAATGTCTCTGTGAGACTCGAGAACTTTCATT | |
| | | TTTTTCCAGGCTGGTTCGGATTTGGGGTGGATT | |
| | | TTGGTTTTGTTCCCCTCCTCCACTCTCCCCCACC | |
| | | CCCTCCCCGCCCTTTTTTTTTTTTTTTTTTAAAC | |
| | | TGGTATTTTATCTTTGATTCTCCTTCAGCCCTCA | |
| | | CCCCTGGTTCTCATCTTTCTTGATCAACATCTTT | |
| | | TCTTGCCTCTGTCCCCTTCTCTCATCTCTTAGCT | |
| | | CCCCTCCAACCTGGGGGGCAGTGGTGTGGAGA | |
| | | AGCCACAGGCCTGAGATTTCATCTGCTCTCCTT | |
| | | CCTGGAGCCCAGAGGAGGGCAGCAGAAGGGG | |
| | | GTGGTGTCTCCAACCCCCCAGCACTGAGGAAG | |
| | | AACGGGGCTCTTCTCATTTCACCCCTCCCTTTC | |
| | | TCCCCTGCCCCCAGGACTGGGCCACTTCTGGGT | |
| | | GGGGCAGTGGGTCCCAGATTGGCTCACACTGA | |
| | | GAATGTAAGAACTACAAACAAAATTTCTATTA | |
| | | AATTAAATTTTGTGTCTCC | |
| 3UTR-014 | Colla1; | CTCCCTCCATCCCAACCTGGCTCCCTCCCACCC | 22 |
| | collagen, | AACCAACTTTCCCCCCAACCCGGAAACAGACA | |
| | type I, | AGCAACCCAAACTGAACCCCCTCAAAAGCCAA | |
| | alpha 1 | AAAATGGGAGACAATTTCACATGGACTTTGGA | |
| | | AAATATTTTTTTCCTTTGCATTCATCTCTCAAAC | |
| | | TTAGTTTTTATCTTTGACCAACCGAACATGACC | |
| | | AAAAACCAAAAGTGCATTCAACCTTACCAAAA | |
| | | AAAAAAAAAAAAAAAGAATAAATAAATAACT | |
| | | TTTTAAAAAAGGAAGCTTGGTCCACTTGCTTGA | |
| | | AGACCCATGCGGGGGTAAGTCCCTTTCTGCCC | |
| | | GTTGGGCTTATGAAACCCCAATGCTGCCCTTTC | |
| | | TGCTCCTTTCTCCACACCCCCCTTGGGGCCTCC | |
| | | CCTCCACTCCTTCCCAAATCTGTCTCCCCAGAA | |
| | | GACACAGGAAACAATGTATTGTCTGCCCAGCA | |
| | | ATCAAAGGCAATGCTCAAACACCCAAGTGGCC | |
| | | CCCACCCTCAGCCCGCTCCTGCCCGCCCAGCA | |
| | | CCCCCAGGCCCTGGGGGACCTGGGGTTCTCAG | |
| | | ACTGCCAAAGAAGCCTTGCCATCTGGCGCTCC | |
| | | CATGGCTCTTGCAACATCTCCCCTTCGTTTTTG | |
| | | AGGGGGTCATGCCGGGGGAGCCACCAGCCCCT | |
| | | CACTGGGTTCGGAGGAGAGTCAGGAAGGGCCA | |
| | | CGACAAAGCAGAAACATCGGATTTGGGGAACG | |
| | | CGTGTCAATCCCTTGTGCCGCAGGGCTGGGCG | |
| | | GGAGAGACTGTTCTGTTCCTTGTGTAACTGTGT | |
| | | TGCTGAAAGACTACCTCGTTCTTGTCTTGATGT | |
| | | GTCACCGGGGCAACTGCCTGGGGGCGGGGATG | |
| | | GGGGCAGGGTGGAAGCGGCTCCCCATTTTATA | |
| | | CCAAAGGTGCTACATCTATGTGATGGGTGGGG | |
| | | TGGGGAGGGAATCACTGGTGCTATAGAAATTG | |
| | | AGATGCCCCCCCAGGCCAGCAAATGTTCCTTTT | |
| | | TGTTCAAAGTCTATTTTTATTCCTTGATATTTTT | |
| | | CTTTTTTTTTTTTTTTTTTTGTGGATGGGGACTT | |
| | | GTGAATTTTTCTAAAGGTGCTATTTAACATGGG | |
| | | AGGAGAGCGTGTGCGGCTCCAGCCCAGCCCGC | |
| | | TGCTCACTTTCCACCCTCTCTCCACCTGCCTCT | |
| | | GGCTTCTCAGGCCTCTGCTCTCCGACCTCTCTC | |
| | | CTCTGAAACCCTCCTCCACAGCTGCAGCCCATC | |
| | | CTCCCGGCTCCCTCCTAGTCTGTCCTGCGTCCT | |
| | | CTGTCCCCGGGTTTCAGAGACAACTTCCCAAA | |
| | | GCACAAAGCAGTTTTTCCCCCTAGGGGTGGGA | |
| | | GGAAGCAAAAGACTCTGTACCTATTTTGTATGT | |
| | | GTATAATAATTTGAGATGTTTTTAATTATTTTG | |
| | | ATTGCTGGAATAAAGCATGTGGAAATGACCCA | |
| | | AACATAATCCGCAGTGGCCTCCTAATTTCCTTC | |
| | | TTTGGAGTTGGGGGAGGGGTAGACATGGGGAA | |
| | | GGGGCTTTGGGGTGATGGGCTTGCCTTCCATTC | |
| | | CTGCCCTTTCCCTCCCCACTATTCTCTTCTAGAT | |
| | | CCCTCCATAACCCCACTCCCCTTTCTCTCACCC | |
| | | TTCTTATACCGCAAACCTTTCTACTTCCTCTTTC | |
| | | ATTTTCTATTCTTGCAATTTCCTTGCACCTTTTC | |
| | | CAAATCCTCTTCTCCCCTGCAATACCATACAGG | |
| | | CAATCCACGTGCACAACACACACACACACTCT | |
| | | TCACATCTGGGGTTGTCCAAACCTCATACCCAC | |
| | | TCCCCTTCAAGCCCATCCACTCTCCACCCCCTG | |
| | | GATGCCCTGCACTTGGTGGCGGTGGGATGCTC | |
| | | ATGGATACTGGGAGGGTGAGGGGAGTGGAAC | |
| | | CCGTGAGGAGGACCTGGGGGCCTCTCCTTGAA | |
| | | CTGACATGAAGGGTCATCTGGCCTCTGCTCCCT | |
| | | TCTCACCCACGCTGACCTCCTGCCGAAGGAGC | |
| | | AACGCAACAGGAGAGGGGTCTGCTGAGCCTGG | |
| | | CGAGGGTCTGGGAGGGACCAGGAGGAAGGCG | |
| | | TGCTCCCTGCTCGCTGTCCTGGCCCTGGGGGAG | |
| | | TGAGGGAGACAGACACCTGGGAGAGCTGTGG | |
| | | GGAAGGCACTCGCACCGTGCTCTTGGGAAGGA | |
| | | AGGAGACCTGGCCCTGCTCACCACGGACTGGG | |
| | | TGCCTCGACCTCCTGAATCCCCAGAACACAAC | |
| | | CCCCCTGGGCTGGGGTGGTCTGGGGAACCATC | |
| | | GTGCCCCCGCCTCCCGCCTACTCCTTTTTAAGC | |
| | | TT | |
| 3UTR-015 | Plod1; | TTGGCCAGGCCTGACCCTCTTGGACCTTTCTTC | 23 |
| | procollagen- | TTTGCCGACAACCACTGCCCAGCAGCCTCTGG | |
| | lysine, 2- | GACCTCGGGGTCCCAGGGAACCCAGTCCAGCC | |
| | oxoglutarate | TCCTGGCTGTTGACTTCCCATTGCTCTTGGAGC | |
| | 5- | CACCAATCAAAGAGATTCAAAGAGATTCCTGC | |
| | dioxygenase 1 | AGGCCAGAGGCGGAACACACCTTTATGGCTGG | |
| | | GGCTCTCCGTGGTGTTCTGGACCCAGCCCCTGG | |
| | | AGACACCATTCACTTTTACTGCTTTGTAGTGAC | |
| | | TCGTGCTCTCCAACCTGTCTTCCTGAAAAACCA | |
| | | AGGCCCCCTTCCCCCACCTCTTCCATGGGGTGA | |
| | | GACTTGAGCAGAACAGGGGCTTCCCCAAGTTG | |
| | | CCCAGAAAGACTGTCTGGGTGAGAAGCCATGG | |
| | | CCAGAGCTTCTCCCAGGCACAGGTGTTGCACC | |
| | | AGGGACTTCTGCTTCAAGTTTTGGGGTAAAGA | |
| | | CACCTGGATCAGACTCCAAGGGCTGCCCTGAG | |
| | | TCTGGGACTTCTGCCTCCATGGCTGGTCATGAG | |
| | | AGCAAACCGTAGTCCCCTGGAGACAGCGACTC | |
| | | CAGAGAACCTCTTGGGAGACAGAAGAGGCATC | |
| | | TGTGCACAGCTCGATCTTCTACTTGCCTGTGGG | |
| | | GAGGGGAGTGACAGGTCCACACACCACACTGG | |
| | | GTCACCCTGTCCTGGATGCCTCTGAAGAGAGG | |
| | | GACAGACCGTCAGAAACTGGAGAGTTTCTATT | |
| | | AAAGGTCATTTAAACCA | |
| 3UTR-016 | Nucb1; | TCCTCCGGGACCCCAGCCCTCAGGATTCCTGAT | 24 |
| | nucleobindin 1 | GCTCCAAGGCGACTGATGGGCGCTGGATGAAG | |
| | | TGGCACAGTCAGCTTCCCTGGGGGCTGGTGTC | |
| | | ATGTTGGGCTCCTGGGGCGGGGGCACGGCCTG | |
| | | GCATTTCACGCATTGCTGCCACCCCAGGTCCAC | |
| | | CTGTCTCCACTTTCACAGCCTCCAAGTCTGTGG | |
| | | CTCTTCCCTTCTGTCCTCCGAGGGGCTTGCCTT | |
| | | CTCTCGTGTCCAGTGAGGTGCTCAGTGATCGGC | |
| | | TTAACTTAGAGAAGCCCGCCCCCTCCCCTTCTC | |
| | | CGTCTGTCCCAAGAGGGTCTGCTCTGAGCCTGC | |
| | | GTTCCTAGGTGGCTCGGCCTCAGCTGCCTGGGT | |
| | | TGTGGCCGCCCTAGCATCCTGTATGCCCACAGC | |
| | | TACTGGAATCCCCGCTGCTGCTCCGGGCCAAG | |
| | | CTTCTGGTTGATTAATGAGGGCATGGGGTGGT | |
| | | CCCTCAAGACCTTCCCCTACCTTTTGTGGAACC | |
| | | AGTGATGCCTCAAAGACAGTGTCCCCTCCACA | |
| | | GCTGGGTGCCAGGGGCAGGGGATCCTCAGTAT | |
| | | AGCCGGTGAACCCTGATACCAGGAGCCTGGGC | |
| | | CTCCCTGAACCCCTGGCTTCCAGCCATCTCATC | |
| | | GCCAGCCTCCTCCTGGACCTCTTGGCCCCCAGC | |
| | | CCCTTCCCCACACAGCCCCAGAAGGGTCCCAG | |
| | | AGCTGACCCCACTCCAGGACCTAGGCCCAGCC | |
| | | CCTCAGCCTCATCTGGAGCCCCTGAAGACCAG | |
| | | TCCCACCCACCTTTCTGGCCTCATCTGACACTG | |
| | | CTCCGCATCCTGCTGTGTGTCCTGTTCCATGTT | |
| | | CCGGTTCCATCCAAATACACTTTCTGGAACAAA | |
| 3UTR-017 | α-globin | GCTGGAGCCTCGGTGGCCATGCTTCTTGCCCCT | 25 |
| | | TGGGCCTCCCCCCAGCCCCTCCTCCCCTTCCTG | |
| | | CACCCGTACCCCCGTGGTCTTTGAATAAAGTCT | |
| | | GAGTGGGCGGC | |

[0303] It should be understood that those listed in the previous tables are examples and that any UTR from any gene may be incorporated into the respective first or second flanking region of the primary construct. Furthermore, multiple wild-type UTRs of any known gene may be utilized. It is also within the scope of the present invention to provide artificial UTRs which are not variants of wild type genes. These UTRs or portions thereof may be placed in the same orientation as in the transcript from which they were selected or may be altered in orientation or location. Hence a 5′ or 3′ UTR may be inverted, shortened, lengthened, made chimeric with one or more other 5′ UTRs or 3′ UTRs. As used herein, the term “altered” as it relates to a UTR sequence, means that the UTR has been changed in some way in relation to a reference sequence. For example, a 3′ or 5′ UTR may be altered relative to a wild type or native UTR by the change in orientation or location as taught above or may be altered by the inclusion of additional nucleotides, deletion of nucleotides, swapping or transposition of nucleotides. Any of these changes producing an “altered” UTR (whether 3′ or 5′) comprise a variant UTR.

[0304] In one embodiment, a double, triple or quadruple UTR such as a 5′ or 3′ UTR may be used. As used herein, a “double” UTR is one in which two copies of the same UTR are encoded either in series or substantially in series. For example, a double beta-globin 3′ UTR may be used as described in US Patent publication 20100129877, the contents of which are incorporated herein by reference in its entirety.

[0305] It is also within the scope of the present invention to have patterned UTRs. As used herein “patterned UTRs” are those UTRs which reflect a repeating or alternating pattern, such as ABABAB or AABBAABBAABB or ABCABCABC or variants thereof repeated once, twice, or more than 3 times. In these patterns, each letter, A, B, or C represent a different UTR at the nucleotide level.

[0306] In one embodiment, flanking regions are selected from a family of transcripts whose proteins share a common function, structure, feature of property. For example, polypeptides of interest may belong to a family of proteins which are expressed in a particular cell, tissue or at some time during development. The UTRs from any of these genes may be swapped for any other UTR of the same or different family of proteins to create a new chimeric primary transcript. As used herein, a “family of proteins” is used in the broadest sense to refer to a group of two or more polypeptides of interest which share at least one function, structure, feature, localization, origin, or expression pattern.

[0307] After optimization (if desired), the primary construct components are reconstituted and transformed into a vector such as, but not limited to, plasmids, viruses, cosmids, and artificial chromosomes. For example, the optimized construct may be reconstituted and transformed into chemically competent E. coli, yeast, neurospora, maize, drosophila, etc. where high copy plasmid-like or chromosome structures occur by methods described herein. Stop Codons

[0308] In one embodiment, the primary constructs of the present invention may include at least two stop codons before the 3′ untranslated region (UTR). The stop codon may be selected from TGA, TAA and TAG. In one embodiment, the primary constructs of the present invention include the stop codon TGA and one additional stop codon. In a further embodiment the addition stop codon may be TAA.

### Vector Amplification

[0309] The vector containing the primary construct is then amplified and the plasmid isolated and purified using methods known in the art such as, but not limited to, a maxi prep using the Invitrogen PURELINK™ HiPure Maxiprep Kit (Carlsbad, CA).

### Plasmid Linearization

[0310] The plasmid may then be linearized using methods known in the art such as, but not limited to, the use of restriction enzymes and buffers. The linearization reaction may be purified using methods including, for example Invitrogen's PURELINK™ PCR Micro Kit (Carlsbad, CA), and HPLC based purification methods such as, but not limited to, strong anion exchange HPLC, weak anion exchange HPLC, reverse phase HPLC (RP-HPLC), and hydrophobic interaction HPLC (HIC-HPLC) and Invitrogen's standard PURELINK™ PCR Kit (Carlsbad, CA). The purification method may be modified depending on the size of the linearization reaction which was conducted. The linearized plasmid is then used to generate cDNA for in vitro transcription (IVT) reactions.

cDNA Template Synthesis

[0311] A cDNA template may be synthesized by having a linearized plasmid undergo polymerase chain reaction (PCR). Table 8 is a listing of primers and probes that may be useful in the PCR reactions of the present invention. It should be understood that the listing is not exhaustive and that primer-probe design for any amplification is within the skill of those in the art. Probes may also contain chemically modified bases to increase base-pairing fidelity to the target molecule and base-pairing strength. Such modifications may include 5-methyl-Cytidine, 2,6-di-amino-purine, 2′-fluoro, phosphoro-thioate, or locked nucleic acids.

TABLE 8
Primers and Probes

| Primer/ | | | |
|---|---|---|---|
| Probe | | Hybridization | SEQ ID |
| Identifier | Sequence (5′-3′) | target | NO. |
| UFP | TTGGACCCTCGTACAGAAGCTAA | cDNA Template | 26 |
| | TACG | | |
| URP | Tₓ₁₆₀CTTCCTACTCAGGCTTTATTC | cDNA Template | 27 |
| | AAAGACCA | | |
| GBA1 | CCTTGACCTTCTGGAACTTC | Acid | 28 |
| | | glucocerebrosidase | |
| GBA2 | CCAAGCACTGAAACGGATAT | Acid | 29 |
| | | glucocerebrosidase | |
| LUC1 | GATGAAAAGTGCTCCAAGGA | Luciferase | 30 |
| LUC2 | AACCGTGATGAAAAGGTACC | Luciferase | 31 |
| LUC3 | TCATGCAGATTGGAAAGGTC | Luciferase | 32 |
| GCSF1 | CTTCTTGGACTGTCCAGAGG | G-CSF | 33 |
| GCSF2 | GCAGTCCCTGATACAAGAAC | G-CSF | 34 |
| GCSF3 | GATTGAAGGTGGCTCGCTAC | G-CSF | 35 |

*UFP is universal forward primer; URP is universal reverse primer.

[0312] In one embodiment, the cDNA may be submitted for sequencing analysis before undergoing transcription.

### Polynucleotide Production

[0313] The process of polynucleotide production may include, but is not limited to, in vitro transcription, cDNA template removal and RNA clean-up, and capping and/or tailing reactions.

### In Vitro Transcription

[0314] The cDNA produced in the previous step may be transcribed using an in vitro transcription (IVT) system. The system typically comprises a transcription buffer, nucleotide triphosphates (NTPs), an RNase inhibitor and a polymerase. The NTPs may be manufactured in house, may be selected from a supplier, or may be synthesized as described herein. The NTPs may be selected from, but are not limited to, those described herein including natural and unnatural (modified) NTPs. The polymerase may be selected from, but is not limited to, T7 RNA polymerase, T3 RNA polymerase and mutant polymerases such as, but not limited to, polymerases able to be incorporated into modified nucleic acids.

### RNA Polymerases

[0315] Any number of RNA polymerases or variants may be used in the design of the primary constructs of the present invention.

[0316] RNA polymerases may be modified by inserting or deleting amino acids of the RNA polymerase sequence. As a non-limiting example, the RNA polymerase may be modified to exhibit an increased ability to incorporate a 2′-modified nucleotide triphosphate compared to an unmodified RNA polymerase (see International Publication WO2008078180 and U.S. Pat. No. 8,101,385; herein incorporated by reference in their entireties).

[0317] Variants may be obtained by evolving an RNA polymerase, optimizing the RNA polymerase amino acid and/or nucleic acid sequence and/or by using other methods known in the art. As a non-limiting example, T7 RNA polymerase variants may be evolved using the continuous directed evolution system set out by Esvelt et al. (Nature (2011) 472(7344):499-503; herein incorporated by reference in its entirety) where clones of T7 RNA polymerase may encode at least one mutation such as, but not limited to, lysine at position 93 substituted for threonine (K93T), I4M, A7T, E63V, V64D, A65E, D66Y, T76N, C125R, S128R, A136T, N165S, G175R, H176L, Y178H, F182L, L196F, G198V, D208Y, E222K, S228A, Q239R, T243N, G259D, M2671, G280C, H300R, D351A, A354S, E356D, L360P, A383V, Y385C, D388Y, S397R, M401T, N410S, K450R, P451T, G452V, E484A, H523L, H524N, G542V, E565K, K577E, K577M, N601S, S684Y, L699I, K713E, N748D, Q754R, E775K, A827V, D851N or L864F. As another non-limiting example, T7 RNA polymerase variants may encode at least mutation as described in U.S. Pub. Nos. 20100120024 and 20070117112; herein incorporated by reference in their entireties. Variants of RNA polymerase may also include, but are not limited to, substitutional variants, conservative amino acid substitution, insertional variants, deletional variants and/or covalent derivatives.

[0318] In one embodiment, the primary construct may be designed to be recognized by the wild type or variant RNA polymerases. In doing so, primary construct may be modified to contain sites or regions of sequence changes from the wild type or parent primary construct.

[0319] In one embodiment, the primary construct may be designed to include at least one substitution and/or insertion upstream of an RNA polymerase binding or recognition site, downstream of the RNA polymerase binding or recognition site, upstream of the TATA box sequence, downstream of the TATA box sequence of the primary construct but upstream of the coding region of the primary construct, within the 5′UTR, before the 5′UTR and/or after the 5′UTR.

[0320] In one embodiment, the 5′UTR of the primary construct may be replaced by the insertion of at least one region and/or string of nucleotides of the same base. The region and/or string of nucleotides may include, but is not limited to, at least 3, at least 4, at least 5, at least 6, at least 7 or at least 8 nucleotides and the nucleotides may be natural and/or unnatural. As a non-limiting example, the group of nucleotides may include 5-8 adenine, cytosine, thymine, a string of any of the other nucleotides disclosed herein and/or combinations thereof.

[0321] In one embodiment, the 5′UTR of the primary construct may be replaced by the insertion of at least two regions and/or strings of nucleotides of two different bases such as, but not limited to, adenine, cytosine, thymine, any of the other nucleotides disclosed herein and/or combinations thereof. For example, the 5′UTR may be replaced by inserting 5-8 adenine bases followed by the insertion of 5-8 cytosine bases. In another example, the 5′UTR may be replaced by inserting 5-8 cytosine bases followed by the insertion of 5-8 adenine bases.

[0322] In one embodiment, the primary construct may include at least one substitution and/or insertion downstream of the transcription start site which may be recognized by an RNA polymerase. As a non-limiting example, at least one substitution and/or insertion may occur downstream the transcription start site by substituting at least one nucleic acid in the region just downstream of the transcription start site (such as, but not limited to, +1 to +6). Changes to region of nucleotides just downstream of the transcription start site may affect initiation rates, increase apparent nucleotide triphosphate (NTP) reaction constant values, and increase the dissociation of short transcripts from the transcription complex curing initial transcription (Brieba et al, Biochemistry (2002) 41: 5144-5149; herein incorporated by reference in its entirety). The modification, substitution and/or insertion of at least one nucleic acid may cause a silent mutation of the nucleic acid sequence or may cause a mutation in the amino acid sequence.

[0323] In one embodiment, the primary construct may include the substitution of at least 1, at least 2, at least 3, at least 4, at least 5, at least 6, at least 7, at least 8, at least 9, at least 10, at least 11, at least 12 or at least 13 guanine bases downstream of the transcription start site.

[0324] In one embodiment, the primary construct may include the substitution of at least 1, at least 2, at least 3, at least 4, at least 5 or at least 6 guanine bases in the region just downstream of the transcription start site. As a non-limiting example, if the nucleotides in the region are GGGAGA the guanine bases may be substituted by at least 1, at least 2, at least 3 or at least 4 adenine nucleotides. In another non-limiting example, if the nucleotides in the region are GGGAGA the guanine bases may be substituted by at least 1, at least 2, at least 3 or at least 4 cytosine bases. In another non-limiting example, if the nucleotides in the region are GGGAGA the guanine bases may be substituted by at least 1, at least 2, at least 3 or at least 4 thymine, and/or any of the nucleotides described herein.

[0325] In one embodiment, the primary construct may include at least one substitution and/or insertion upstream of the start codon. For the purpose of clarity, one of skill in the art would appreciate that the start codon is the first codon of the protein coding region whereas the transcription start site is the site where transcription begins. The primary construct may include, but is not limited to, at least 1, at least 2, at least 3, at least 4, at least 5, at least 6, at least 7 or at least 8 substitutions and/or insertions of nucleotide bases. The nucleotide bases may be inserted or substituted at 1, at least 1, at least 2, at least 3, at least 4 or at least 5 locations upstream of the start codon. The nucleotides inserted and/or substituted may be the same base (e.g., all A or all C or all T or all G), two different bases (e.g., A and C, A and T, or C and T), three different bases (e.g., A, C and T or A, C and T) or at least four different bases. As a non-limiting example, the guanine base upstream of the coding region in the primary construct may be substituted with adenine, cytosine, thymine, or any of the nucleotides described herein. In another non-limiting example the substitution of guanine bases in the primary construct may be designed so as to leave one guanine base in the region downstream of the transcription start site and before the start codon (see Esvelt et al. Nature (2011) 472(7344):499-503; herein incorporated by reference in its entirety). As a non-limiting example, at least 5 nucleotides may be inserted at 1 location downstream of the transcription start site but upstream of the start codon and the at least 5 nucleotides may be the same base type.

cDNA Template Removal and Clean-Up

[0326] The cDNA template may be removed using methods known in the art such as, but not limited to, treatment with Deoxyribonuclease I (DNase I). RNA clean-up may also include a purification method such as, but not limited to, AGENCOURT® CLEANSEQ® system from Beckman Coulter (Danvers, MA), HPLC based purification methods such as, but not limited to, strong anion exchange HPLC, weak anion exchange HPLC, reverse phase HPLC (RP-HPLC), and hydrophobic interaction HPLC (HIC-HPLC).

Capping and/or Tailing Reactions

[0327] The primary construct or mmRNA may also undergo capping and/or tailing reactions. A capping reaction may be performed by methods known in the art to add a 5′ cap to the 5′ end of the primary construct. Methods for capping include, but are not limited to, using a Vaccinia Capping enzyme (New England Biolabs, Ipswich, MA).

[0328] A poly-A tailing reaction may be performed by methods known in the art, such as, but not limited to, 2′ O-methyltransferase and by methods as described herein. If the primary construct generated from cDNA does not include a poly-T, it may be beneficial to perform the poly-A-tailing reaction before the primary construct is cleaned.

### Purification

[0329] The primary construct or mmRNA purification may include, but is not limited to, mRNA or mmRNA clean-up, quality assurance and quality control. mRNA or mmRNA clean-up may be performed by methods known in the arts such as, but not limited to, AGENCOURT® beads (Beckman Coulter Genomics, Danvers, MA), poly-T beads, LNA™ oligo-T capture probes (EXIQON® Inc, Vedbaek, Denmark) or HPLC based purification methods such as, but not limited to, strong anion exchange HPLC, weak anion exchange HPLC, reverse phase HPLC (RP-HPLC), and hydrophobic interaction HPLC (HIC-HPLC). The term “purified” when used in relation to a polynucleotide such as a “purified mRNA or mmRNA” refers to one that is separated from at least one contaminant. As used herein, a “contaminant” is any substance which makes another unfit, impure or inferior. Thus, a purified polynucleotide (e.g., DNA and RNA) is present in a form or setting different from that in which it is found in nature, or a form or setting different from that which existed prior to subjecting it to a treatment or purification method.

[0330] A quality assurance and/or quality control check may be conducted using methods such as, but not limited to, gel electrophoresis, UV absorbance, or analytical HPLC.

[0331] In another embodiment, the mRNA or mmRNA may be sequenced by methods including, but not limited to reverse-transcriptase-PCR.

[0332] In one embodiment, the mRNA or mmRNA may be quantified using methods such as, but not limited to, ultraviolet visible spectroscopy (UV/Vis). A non-limiting example of a UV/Vis spectrometer is a NANODROP® spectrometer (ThermoFisher, Waltham, MA). The quantified mRNA or mmRNA may be analyzed in order to determine if the mRNA or mmRNA may be of proper size, check that no degradation of the mRNA or mmRNA has occurred. Degradation of the mRNA and/or mmRNA may be checked by methods such as, but not limited to, agarose gel electrophoresis, HPLC based purification methods such as, but not limited to, strong anion exchange HPLC, weak anion exchange HPLC, reverse phase HPLC (RP-HPLC), and hydrophobic interaction HPLC (HIC-HPLC), liquid chromatography-mass spectrometry (LCMS), capillary electrophoresis (CE) and capillary gel electrophoresis (CGE).

### Signal Peptides or Proteins

[0333] The primary constructs or mmRNA may also encode additional features which facilitate trafficking of the polypeptides to therapeutically relevant sites. One such feature which aids in protein trafficking is the signal peptide sequence. As used herein, a “signal sequence” or “signal peptide” is a polynucleotide or polypeptide, respectively, which is from about 9 to 200 nucleotides (3-60 amino acids) in length which is incorporated at the 5′ (or N-terminus) of the coding region or polypeptide encoded, respectively. Addition of these sequences result in trafficking of the encoded polypeptide to the endoplasmic reticulum through one or more secretory pathways. Some signal peptides are cleaved from the protein by signal peptidase after the proteins are transported.

[0334] Table 9 is a representative listing of signal proteins or peptides which may be incorporated for encoding by the polynucleotides, primary constructs or mmRNA of the invention.

TABLE 9
Signal Peptides

| | | | SEQ | | SEQ |
|---|---|---|---|---|---|
| | | NUCLEOTIDE SEQUENCE | ID | ENCODED | ID |
| ID | Description | (5′-3′) | NO. | PEPTIDE | NO. |
| SS- | α-1- | ATGATGCCATCCTCAGTCTCA | 36 | MMPSSVSW | 98 |
| 001 | antitrypsin | TGGGGTATTTTGCTCTTGGCG | | GILLAGLCC | |
| | | GGTCTGTGCTGTCTCGTGCCG | | LVPVSLA | |
| | | GTGTCGCTCGCA | | | |
| SS- | G-CSF | ATGGCCGGACCGGCGACTCAG | 37 | MAGPATQS | 99 |
| 002 | | TCGCCCATGAAACTCATGGCC | | PMKLMALQ | |
| | | CTGCAGTTGTTGCTTTGGCAC | | LLLWHSAL | |
| | | TCAGCCCTCTGGACCGTCCAA | | WTVQEA | |
| | | GAGGCG | | | |
| SS- | Factor IX | ATGCAGAGAGTGAACATGATT | 38 | MQRVNMIM | 100 |
| 003 | | ATGGCCGAGTCCCCATCGCTC | | AESPSLITIC | |
| | | ATCACAATCTGCCTGCTTGGT | | LLGYLLSAE | |
| | | ACCTGCTTTCCGCCGAATGCA | | CTVFLDHEN | |
| | | CTGTCTTTCTGGATCACGAGA | | ANKILNRPKR | |
| | | ATGCGAATAAGATCTTGAACC | | | |
| | | GACCCAAACGG | | | |
| SS- | Prolactin | ATGAAAGGATCATTGCTGTTG | 39 | MKGSLLLLL | 101 |
| 004 | | CTCCTCGTGTCGAACCTTCTG | | VSNLLLCQS | |
| | | CTTTGCCAGTCCGTAGCCCCC | | VAP | |
| SS- | Albumin | ATGAAATGGGTGACGTTCATC | 40 | MKWVTFISL | 102 |
| 005 | | TCACTGTTGTTTTTGTTCTCGT | | LFLFSSAYS | |
| | | CCGCCTACTCCAGGGGAGTAT | | RGVFRR | |
| | | TCCGCCGA | | | |
| SS- | HMMSP38 | ATGTGGTGGCGGCTCTGGTGG | 41 | MWWRLWW | 103 |
| 006 | | CTGCTCCTGTTGCTCCTCTTGC | | LLLLLLLLP | |
| | | TGTGGCCCATGGTGTGGGCA | | MWA | |
| MLS- | ornithine | TGCTCTTTAACCTCCGCATCCT | 42 | MLFNLRILL | 104 |
| 001 | carbamoyltransferase | GTTGAATAACGCTGCGTTCCG | | NNAAFRNG | |
| | | AAATGGGCATAACTTCATGGT | | HNFMVRNF | |
| | | ACGCAACTTCAGATGCGGCCA | | RCGQPLQ | |
| | | GCCACTCCAG | | | |
| MLS- | Cytochrome | ATGTCCGTCTTGACACCCCTG | 43 | MSVLTPLLL | 105 |
| 002 | C Oxidase | CTCTTGAGAGGGCTGACGGGG | | RGLTGSARR | |
| | subunit 8A | TCCGCTAGACGCCTGCCGGTA | | LPVPRAKIH | |
| | | CCGCGAGCGAAGATCCACTCC | | SL | |
| | | CTG | | | |
| MLS- | Cytochrome | ATGAGCGTGCTCACTCCGTTG | 44 | MSVLTPLLL | 106 |
| 003 | C Oxidase | CTTCTTCGAGGGCTTACGGGA | | RGLTGSARR | |
| | subunit 8A | TCGGCTCGGAGGTTGCCCGTC | | LPVPRAKIH | |
| | | CCGAGAGCGAAGATCCATTCG | | SL | |
| | | TTG | | | |
| SS- | Type III, | TGACAAAAATAACTTTATCTC | 45 | MVTKITLSP | 107 |
| 007 | bacterial | CCCAGAATTTTAGAATCCAAA | | QNFRIQKQE | |
| | | AACAGGAAACCACACTACTA | | TTLLKEKST | |
| | | AAAGAAAAATCAACCGAGAA | | EKNSLAKSI | |
| | | AAATTCTTTAGCAAAAAGTAT | | LAVKNHFIE | |
| | | TCTCGCAGTAAAAATCACTTC | | LRSKLSERFI | |
| | | ATCGAATTAAGGTCAAAATTA | | SHKNT | |
| | | TCGGAACGTTTTATTTCGCAT | | | |
| | | AAGAACACT | | | |
| SS- | Viral | ATGCTGAGCTTTGTGGATACC | 46 | MLSFVDTRT | 108 |
| 008 | | CGCACCCTGCTGCTGCTGGCG | | LLLLAVTSC | |
| | | GTGACCAGCTGCCTGGCGACC | | LATCQ | |
| | | TGCCAG | | | |
| SS- | viral | ATGGGCAGCAGCCAGGCGCC | 47 | MGSSQAPR | 109 |
| 009 | | GCGCATGGGCAGCGTGGGCG | | MGSVGGHG | |
| | | GCCATGGCCTGATGGCGCTGC | | LMALLMAG | |
| | | TGATGGCGGGCCTGATTCTGC | | LILPGILA | |
| | | CGGGCATTCTGGCG | | | |
| SS- | Viral | ATGGCGGGCATTTTTTATTTTC | 48 | MAGIFYFLF | 110 |
| 010 | | TGTTTAGCTTTCTGTTTGGCAT | | SFLFGICD | |
| | | TTGCGAT | | | |
| SS- | Viral | ATGGAAAACCGCCTGCTGCGC | 49 | MENRLLRV | 111 |
| 011 | | GTGTTTCTGGTGTGGGCGGCG | | FLVWAALT | |
| | | CTGACCATGGATGGCGCGAGC | | MDGASA | |
| | | GCG | | | |
| SS- | Viral | ATGGCGCGCCAGGGCTGCTTT | 50 | MARQGCFG | 112 |
| 012 | | GGCAGCTATCAGGTGATTAGC | | SYQVISLFTF | |
| | | CTGTTTACCTTTGCGATTGGC | | AIGVNLCLG | |
| | | GTGAACCTGTGCCTGGGC | | | |
| SS- | Bacillus | ATGAGCCGCCTGCCGGTGCTG | 51 | MSRLPVLLL | 113 |
| 013 | | CTGCTGCTGCAGCTGCTGGTG | | LQLLVRPGLQ | |
| | | CGCCCGGGCCTGCAG | | | |
| SS- | Bacillus | ATGAAACAGCAGAAACGCCT | 52 | MKQQKRLY | 114 |
| 014 | | GTATGCGCGCCTGCTGACCCT | | ARLLTLLFA | |
| | | GCTGTTTGCGCTGATTTTTCTG | | LIFLLPHSSA | |
| | | CTGCCGCATAGCAGCGCGAGC | | SA | |
| | | GCG | | | |
| SS- | Secretion | ATGGCGACGCCGCTGCCTCCG | 53 | MATPLPPPS | 115 |
| 015 | signal | CCCTCCCCGCGGCACCTGCGG | | PRHLRLLRL | |
| | | CTGCTGCGGCTGCTGCTCTCC | | LLSG | |
| | | GCCCTCGTCCTCGGC | | | |
| SS- | Secretion | ATGAAGGCTCCGGGTCGGCTC | 54 | MKAPGRLV | 116 |
| 016 | signal | GTGCTCATCATCCTGTGCTCC | | LIILCSVVFS | |
| | | GTGGTCTTCTCT | | | |
| SS- | Secretion | ATGCTTCAGCTTTGGAAACTT | 55 | MLQLWKLL | 117 |
| 017 | signal | GTTCTCCTGTGCGGCGTGCTC | | CGVLT | |
| | | ACT | | | |
| SS- | Secretion | ATGCTTTATCTCCAGGGTTGG | 56 | MLYLQGWS | 118 |
| 018 | signal | AGCATGCCTGCTGTGGCA | | MPAVA | |
| SS- | Secretion | ATGGATAACGTGCAGCCGAA | 57 | MDNVQPKI | 119 |
| 019 | signal | AATAAAACATCGCCCCTTCTG | | KHRPFCFSV | |
| | | CTTCAGTGTGAAAGGCCACGT | | KGHVKMLR | |
| | | GAAGATGCTGCGGCTGGATAT | | LDIINSLVTT | |
| | | TATCAACTCACTGGTAACAAC | | VFMLIVSVL | |
| | | AGTATTCATGCTCATCGTATC | | ALIP | |
| | | TGTGTTGGCACTGATACCA | | | |
| SS- | Secretion | ATGCCCTGCCTAGACCAACAG | 58 | MPCLDQQL | 120 |
| 020 | signal | CTCACTGTTCATGCCCTACCCT | | TVHALPCPA | |
| | | GCCCTGCCCAGCCCTCCTCTC | | QPSSLAFCQ | |
| | | TGGCCTTCTGCCAAGTGGGGT | | VGFLTA | |
| | | TCTTAACAGCA | | | |
| SS- | Secretion | ATGAAAACCTTGTTCAATCCA | 59 | MKTLFNPAP | 121 |
| 021 | signal | GCCCCTGCCATTGCTGACCTG | | AIADLDPQF | |
| | | GATCCCCAGTTCTACACCCTC | | YTLSDVFCC | |
| | | TCAGATGTGTTCTGCTGCAAT | | NESEAEILT | |
| | | GAAAGTGAGGCTGAGATTTTA | | GLTVGSAA | |
| | | ACTGGCCTCACGGTGGGCAGC | | DA | |
| | | GCTGCAGATGCT | | | |
| SS- | Secretion | ATGAAGCCTCTCCTTGTTGTG | 60 | MKPLLVVF | 122 |
| 022 | signal | TTTGTCTTTCTTTTCCTTTGGG | | VFLFLWDPV | |
| | | ATCCAGTGCTGGCA | | LA | |
| SS- | Secretion | ATGTCCTGTTCCCTAAAGTTT | 61 | MSCSLKFTL | 123 |
| 023 | signal | ACTTTGATTGTAATTTTTTTTT | | IVIFFTCTLS | |
| | | ACTGTTGGCTTTCATCCAGC | | SS | |
| SS- | Secretion | ATGGTTCTTACTAAACCTCTTC | 62 | MVLTKPLQ | 124 |
| 024 | signal | AAAGAAATGGCAGCATGATG | | RNGSMMSF | |
| | | AGCTTTGAAAATGTGAAAGAA | | ENVKEKSRE | |
| | | AAGAGCAGAGAAGGAGGGCC | | GGPHAHTPE | |
| | | CCATGCACACACACCCGAAGA | | EELCFVVTH | |
| | | AGAATTGTGTTTCGTGGTAAC | | TPQVQTTLN | |
| | | ACACTACCCTCAGGTTCAGAC | | LFFHIFKVLT | |
| | | CACACTCAACCTGTTTTTCCAT | | QPLSLLWG | |
| | | ATATTCAAGGTTCTTACTCAA | | | |
| | | CCACTTTCCCTTCTGTGGGGT | | | |
| SS- | Secretion | ATGGCCACCCCGCCATTCCGG | 63 | MATPPFRLI | 125 |
| 025 | signal | CTGATAAGGAAGATGTTTTCC | | RKMFSFKVS | |
| | | TTCAAGGTGAGCAGATGGATG | | RWMGLACF | |
| | | GGGCTTGCCTGCTTCCGGTCC | | RSLAAS | |
| | | CTGGCGGCATCC | | | |
| SS- | Secretion | ATGAGCTTTTTCCAACTCCTG | 64 | MSFFQLLM | 126 |
| 026 | signal | ATGAAAAGGAAGGAACTCAT | | KRKELIPLV | |
| | | TCCCTTGGTGGTGTTCATGAC | | VFMTVAAG | |
| | | TGTGGCGGCGGGTGGAGCCTC | | GASS | |
| | | ATCT | | | |
| SS- | Secretion | ATGGTCTCAGCTCTGCGGGGA | 65 | MVSALRGA | 127 |
| 027 | signal | GCACCCCTGATCAGGGTGCAC | | PLIRVHSSPV | |
| | | TCAAGCCCTGTTTCTTCTCCTT | | SSPSVSGPA | |
| | | CTGTGAGTGGACCACGGAGGC | | ALVSCLSSQ | |
| | | TGGTGAGCTGCCTGTCATCCC | | SSALS | |
| | | AAAGCTCAGCTCTGAGC | | | |
| SS- | Secretion | ATGATGGGGTCCCCAGTGAGT | 66 | MMGSPVSH | 128 |
| 028 | signal | CATCTGCTGGCCGGCTTCTGT | | LLAGFCVW | |
| | | GTGTGGGTCGTCTTGGGC | | VVLG | |
| SS- | Secretion | ATGGCAAGCATGGCTGCCGTG | 67 | MASMAAVL | 129 |
| 029 | signal | CTCACCTGGGCTCTGGCTCTT | | TWALALLS | |
| | | CTTTCAGCGTTTTCGGCCACC | | AFSATQA | |
| | | CAGGCA | | | |
| SS- | Secretion | ATGGTGCTCATGTGGACCAGT | 68 | MVLMWTSG | 130 |
| 030 | signal | GGTGACGCCTTCAAGACGGCC | | DAFKTAYFL | |
| | | TACTTCCTGCTGAAGGGTGCC | | LKGAPLQFS | |
| | | CCTCTGCAGTTCTCCGTGTGC | | VCGLLQVL | |
| | | GGCCTGCTGCAGGTGCTGGTG | | VDLAILGQA | |
| | | GACCTGGCCATCCTGGGGCAG | | TA | |
| | | GCCTACGCC | | | |
| SS- | Secretion | ATGGATTTTGTCGCTGGAGCC | 69 | MDFVAGAI | 131 |
| 031 | signal | ATCGGAGGCGTCTGCGGTGTT | | GGVCGVAV | |
| | | GCTGTGGGCTACCCCCTGGAC | | GYPLDTVK | |
| | | ACGGTGAAGGTCAGGATCCA | | VRIQTEPLY | |
| | | GACGGAGCCAAAGTACACAG | | TGIWHCVR | |
| | | GCATCTGGCACTGCGTCCGGG | | DTYHRERV | |
| | | ATACGTATCACCGAGAGCGCG | | WGFYRGLS | |
| | | TGTGGG | | LPVCTVSLV | |
| | | GCTTCTACCGGGGCCTCTCGC | | SS | |
| | | TGCCCGTGTGCACGGTGTCCC | | | |
| | | TGGTATCTTCC | | | |
| SS- | Secretion | ATGGAGAAGCCCCTCTTCCCA | 70 | MEKPLFPLV | 132 |
| 032 | signal | TTAGTGCCTTTGCATTGGTTTG | | PLHWFGFG | |
| | | GCTTTGGCTACACAGCACTGG | | YTALVVSG | |
| | | TTGTTTCTGGTGGGATCGTTG | | GIVGYVKTG | |
| | | GCTATGTAAAAACAGGCAGC | | SVPSLAAGL | |
| | | GTGCCGTCCCTGGCTGCAGGG | | LFGSLA | |
| | | CTGCTCTTCGGCAGTCTAGCC | | | |
| SS- | Secretion | ATGGGTCTGCTCCTTCCCCTG | 71 | MGLLLPLAL | 133 |
| 033 | signal | GCACTCTGCATCCTAGTCCTG | | CILVLC | |
| | | TGC | | | |
| SS- | Secretion | ATGGGGATCCAGACGAGCCCC | 72 | MGIQTSPVL | 134 |
| 034 | signal | GTCCTGCTGGCCTCCCTGGGG | | LASLGVGLV | |
| | | GTGGGGCTGGTCACTCTGCTC | | TLLGLAVG | |
| | | GGCCTGGCTGTGGGC | | | |
| SS- | Secretion | ATGTCGGACCTGCTACTACTG | 73 | MSDLLLLGL | 135 |
| 035 | signal | GGCCTGATTGGGGGCCTGACT | | IGGLTLLLL | |
| | | CTCTTACTGCTGCTGACGCTG | | LTLLAFA | |
| | | CTAGCCTTTGCC | | | |
| SS- | Secretion | ATGGAGACTGTGGTGATTGTT | 74 | METVVIVAI | 136 |
| 036 | signal | GCCATAGGTGTGCTGGCCACC | | GVLATIFLA | |
| | | ATGTTTCTGGCTTCGTTTGCAG | | SFAALVLVC | |
| | | CCTTGGTGCTGGTTTGCAGGC | | RQ | |
| | | AG | | | |
| SS- | Secretion | ATGCGCGGCTCTGTGGAGTGC | 75 | MAGSVECT | 137 |
| 037 | signal | ACCTGGGGTTGGGGGCACTGT | | WGWGHCAP | |
| | | GCCCCCAGCCCCCTGCTCCTT | | SPLLLWTLL | |
| | | TGGACTCTACTTCTGTTTGCA | | LFAAPFGLLG | |
| | | GCCCCATTTGGCCTGCTGGGG | | | |
| SS- | Secretion | ATGATGCCGTCCCGTACCAAC | 76 | MMPSRTNL | 138 |
| 038 | signal | CTGGCTACTGGAATCCCCAGT | | ATGIPSSKV | |
| | | AGTAAAGTGAAATATTCAAGG | | KYSRLSSTD | |
| | | CTCTCCAGCACAGACGATGGC | | DGYIDLQFK | |
| | | TACATTGACCTTCAGTTTAAG | | KTPPKIPYK | |
| | | AAAACCCCTCCTAAGATCCCT | | AIALATVLF | |
| | | TATAAGGCCATCGCACTTGCC | | LIGA | |
| | | ACTGTGCTGTTTTTGATTGGC | | | |
| | | GCC | | | |
| SS- | Secretion | ATGGCCCTGCCCCAGATGTGT | 77 | MALPQMCD | 139 |
| 039 | signal | GACGGGAGCCACTTGGCCTCC | | GSHLASTLR | |
| | | ACCCTCCGCTATTGCATGACA | | YCMTVSGT | |
| | | GTCAGCGGCACAGTGGTTCTG | | VVLVAGTL | |
| | | GTGGCCGGGACGCTCTGCTTC | | CFA | |
| | | GCT | | | |
| SS- | Vrg-6 | TGAAAAAGTGGTTCGTTGCTG | 78 | MKKWFVAA | 140 |
| 041 | | CCGGCATCGGCGCTGCCGGAC | | GIGAGLLML | |
| | | TCATGCTCTCCAGCGCCGCCA | | SSAA | |
| SS- | PhoA | ATGAAACAGAGCACCATTGCG | 79 | MKQSTIALA | 141 |
| 042 | | CTGGCGCTGCTGCCGCTGCTG | | LLPLLFTPV | |
| | | TTTACCCCGGTGACCAAAGCG | | TKA | |
| SS- | OmpA | ATGAAAAAAACCGCGATTGC | 80 | MKKTAIAIA | 142 |
| 043 | | GATTGCGGTGGCGCTGGCGGG | | VALAGFAT | |
| | | CTTTGCGACCGTGGCGCAGGCG | | VAQA | |
| SS- | STI | ATGAAAAAACTGATGCTGGCG | 81 | MKKLMLAI | 143 |
| 044 | | ATTTTTTTTAGCGTGCTGAGCT | | FFSVLSFPSF | |
| | | TTCCGAGCTTTAGCCAGAGC | | SQS | |
| SS- | STII | ATGAAAAAAAACATTGCGTTT | 82 | MKKNIAFLL | 144 |
| 045 | | CTGCTGGCGAGCATGTTTGTG | | ASMFVFSIA | |
| | | TTTAGCATTGCGACCAACGCG | | TNAYA | |
| | | TATGCG | | | |
| SS- | Amylase | ATGTTTGCGAAACGCTTTAAA | 83 | MFAKRFKTS | 145 |
| 046 | | ACCAGCCTGCTGCCGCTGTTT | | LLPLFAGFL | |
| | | GCGGGCTTTCTGCTGCTGTTTC | | LLFHLVLAG | |
| | | ATCTGGTGCTGGCGGGCCCGG | | PAAAS | |
| | | CGGCGGCGAGC | | | |
| SS- | Alpha | ATGCGCTTTCCGAGCATTTTT | 84 | MRFPSIFTA | 146 |
| 047 | Factor | ACCGCGGTGCTGTTTGCGGCG | | VLFAASSALA | |
| | | AGCAGCGCGCTGGCG | | | |
| SS- | Alpha | ATGCGCTTTCCGAGCATTTTT | 85 | MRFPSIFTT | 147 |
| 048 | Factor | ACCACCGTGCTGTTTGCGGCG | | VLFAASSALA | |
| | | AGCAGCGCGCTGGCG | | | |
| SS- | Alpha | ATGCGCTTTCCGAGCATTTTT | 86 | MRFPSIFTSV | 148 |
| 049 | Factor | ACCAGCGTGCTGTTTGCGGCG | | LFAASSALA | |
| | | AGCAGCGCGCTGGCG | | | |
| SS- | Alpha | ATGCGCTTTCCGAGCATTTTT | 87 | MRFPSIFTH | 149 |
| 050 | Factor | ACCCATGTGCTGTTTGCGGCG | | VLFAASSALA | |
| | | AGCAGCGCGCTGGCG | | | |
| SS- | Alpha | ATGCGCTTTCCGAGCATTTTT | 88 | MRFPSIFTIV | 150 |
| 051 | Factor | ACCATTGTGCTGTTTGCGGCG | | LFAASSALA | |
| | | AGCAGCGCGCTGGCG | | | |
| SS- | Alpha | ATGCGCTTTCCGAGCATTTTT | 89 | MRFPSIFTFV | 151 |
| 052 | Factor | ACCTTTGTGCTGTTTGCGGCG | | LFAASSALA | |
| | | AGCAGCGCGCTGGCG | | | |
| SS- | Alpha | ATGCGCTTTCCGAGCATTTTT | 90 | MRFPSIFTE | 152 |
| 053 | Factor | ACCGAAGTGCTGTTTGCGGCG | | VLFAASSALA | |
| | | AGCAGCGCGCTGGCG | | | |
| SS- | Alpha | ATGCGCTTTCCGAGCATTTTT | 91 | MRFPSIFTG | 153 |
| 054 | Factor | ACCGGCGTGCTGTTTGCGGCG | | VLFAASSALA | |
| | | AGCAGCGCGCTGGCG | | | |
| SS- | Endoglucanase V | ATGCGTTCCTCCCCCCTCCTCC | 92 | MRSSPLLRS | 154 |
| 055 | | GCTCCGCCGTTGTGGCCGCCC | | AVVAALPV | |
| | | TGCCGGTGTTGGCCCTTGCC | | LALA | |
| SS- | Secretion | ATGGGCGCGGCGGCCGTGCGC | 93 | MGAAAVR | 155 |
| 056 | signal | TGGCACTTGTGCGTGCTGCTG | | WHLCVLLA | |
| | | GCCCTGGGCACACGCGGGCG | | LGTRGRL | |
| | | GCTG | | | |
| SS- | Fungal | ATGAGGAGCTCCCTTGTGCTG | 94 | MRSSLVLFF | 156 |
| 057 | | TTCTTTGTCTCTGCGTGGACG | | VSAWTALA | |
| | | GCCTTGGCCAG | | | |
| SS- | Fibronectin | ATGCTCAGGGGTCCGGGACCC | 95 | MLRGPGPG | 157 |
| 058 | | GGGCGGCTGCTGCTGCTAGCA | | RLLLLAVLC | |
| | | GTCCTGTGCCTGGGGACATCG | | LGTSVRCTE | |
| | | GTGCGCTGCACCGAAACCGGG | | TGKSKR | |
| | | AAGAGCAAGAGG | | | |
| SS- | Fibronectin | ATGCTTAGGGGTCCGGGGCCC | 96 | MLRGPGPG | 158 |
| 059 | | GGGCTGCTGCTGCTGGCCGTC | | LLLLAVQCL | |
| | | CAGCTGGGGACAGCGGTGCCC | | GTAVPSTGA | |
| | | TCCACG | | | |
| SS- | Fibronectin | ATGCGCCGGGGGGCCCTGACC | 97 | MRRGALTG | 159 |
| 060 | | GGGCTGCTCCTGGTCCTGTGC | | LLLVLCLSV | |
| | | CTGAGTGTTGTGCTACGTGCA | | VLRAAPSAT | |
| | | GCCCCCTCTGCAACAAGCAAG | | SKKRR | |
| | | AAGCGCAGG | | | |

[0335] In table 9, SS is secretion signal and MLS is mitochondrial leader signal. The primary constructs or mmRNA of the present invention may be designed to encode any of the signal peptide sequences of SEQ ID NOs 98-159, or fragments or variants thereof. These sequences may be included at the beginning of the polypeptide coding region, in the middle or at the terminus or alternatively into a flanking region. Further, any of the polynucleotide primary constructs of the present invention may also comprise one or more of the sequences defined by SEQ ID NOs 36-97. These may be in the first region or either flanking region.

[0336] Additional signal peptide sequences which may be utilized in the present invention include those taught in, for example, databases such as those found at http://www.signalpeptide.de/or http://proline.bic.nus.edu.sg/spdb/. Those described in U.S. Pat. Nos. 8,124,379; 7,413,875 and 7,385,034 are also within the scope of the invention and the contents of each are incorporated herein by reference in their entirety.

[0337] In one embodiment, the modified nucleic acid molecules may include a nucleic acid sequence encoding a nuclear localization signal (NLS) and/or a nuclear export signal (NES). In one aspect, a modified nucleic acid molecules may include a nucleic acid sequence encoding a nuclear localization signal (NLS). The modified nucleic acid molecules encoding a NLS would be able to traffic a polypeptide into the nucleus and deliver a survival or death signal to the nuclear microenvironment. In another aspect, the modified nucleic acid molecules may include a nucleic acid sequence encoding a nuclear export signal such as NES1 and/or NES2. As a nonlimiting example, the modified nucleic acid molecules may encode a NES1, NES2 and a NLS signal and an oncology related polypeptide or a scrambled sequence which is not translatable in order to interact with HIF1-alpha to alter the transcritome of the cancer cells.

### Target Selection

[0338] According to the present invention, the primary constructs comprise at least a first region of linked nucleosides encoding at least one polypeptide of interest. The polypeptides of interest or “targets” or proteins and peptides of the present invention are listed in U.S. Provisional Patent Application No. 61/618,862, filed Apr. 2, 2012, entitled Modified Polynucleotides for the Production of Biologics; U.S. Provisional Patent Application No. 61/681,645, filed Aug. 10, 2012, entitled Modified Polynucleotides for the Production of Biologics; U.S. Provisional Patent Application No. 61/737,130, filed Dec. 14, 2012, entitled Modified Polynucleotides for the Production of Biologics; U.S. Provisional Patent Application No. 61/618,866, filed Apr. 2, 2012, entitled Modified Polynucleotides for the Production of Antibodies; U.S. Provisional Patent Application No. 61/681,647, filed Aug. 10, 2012, entitled Modified Polynucleotides for the Production of Antibodies; U.S. Provisional Patent Application No. 61/737,134, filed Dec. 14, 2012, entitled Modified Polynucleotides for the Production of Antibodies; U.S. Provisional Patent Application No. 61/618,868, filed Apr. 2, 2012, entitled Modified Polynucleotides for the Production of Vaccines; U.S. Provisional Patent Application No. 61/681,648, filed Aug. 10, 2012, entitled Modified Polynucleotides for the Production of Vaccines; U.S. Provisional Patent Application No. 61/737,135, filed Dec. 14, 2012, entitled Modified Polynucleotides for the Production of Vaccines; U.S. Provisional Patent Application No. 61/618,870, filed Apr. 2, 2012, entitled Modified Polynucleotides for the Production of Therapeutic Proteins and Peptides; U.S. Provisional Patent Application No. 61/681,649, filed Aug. 10, 2012, entitled Modified Polynucleotides for the Production of Therapeutic Proteins and Peptides; U.S. Provisional Patent Application No. 61/737,139, filed Dec. 14, 2012, Modified Polynucleotides for the Production of Therapeutic Proteins and Peptides; U.S. Provisional Patent Application No. 61/618,873, filed Apr. 2, 2012, entitled Modified Polynucleotides for the Production of Secreted Proteins; U.S. Provisional Patent Application No. 61/681,650, filed Aug. 10, 2012, entitled Modified Polynucleotides for the Production of Secreted Proteins; U.S. Provisional Patent Application No. 61/737,147, filed Dec. 14, 2012, entitled Modified Polynucleotides for the Production of Secreted Proteins; U.S. Provisional Patent Application No. 61/618,878, filed Apr. 2, 2012, entitled Modified Polynucleotides for the Production of Plasma Membrane Proteins; U.S. Provisional Patent Application No. 61/681,654, filed Aug. 10, 2012, entitled Modified Polynucleotides for the Production of Plasma Membrane Proteins; U.S. Provisional Patent Application No. 61/737,152, filed Dec. 14, 2012, entitled Modified Polynucleotides for the Production of Plasma Membrane Proteins; U.S. Provisional Patent Application No. 61/618,885, filed Apr. 2, 2012, entitled Modified Polynucleotides for the Production of Cytoplasmic and Cytoskeletal Proteins; U.S. Provisional Patent Application No. 61/681,658, filed Aug. 10, 2012, entitled Modified Polynucleotides for the Production of Cytoplasmic and Cytoskeletal Proteins; U.S. Provisional Patent Application No. 61/737,155, filed Dec. 14, 2012, entitled Modified Polynucleotides for the Production of Cytoplasmic and Cytoskeletal Proteins; U.S. Provisional Patent Application No. 61/618,896, filed Apr. 2, 2012, entitled Modified Polynucleotides for the Production of Intracellular Membrane Bound Proteins; U.S. Provisional Patent Application No. 61/668,157, filed Jul. 5, 2012, entitled Modified Polynucleotides for the Production of Intracellular Membrane Bound Proteins; U.S. Provisional Patent Application No. 61/681,661, filed Aug. 10, 2012, entitled Modified Polynucleotides for the Production of Intracellular Membrane Bound Proteins; U.S. Provisional Patent Application No. 61/737,160, filed Dec. 14, 2012, entitled Modified Polynucleotides for the Production of Intracellular Membrane Bound Proteins; U.S. Provisional Patent Application No. 61/618,911, filed Apr. 2, 2012, entitled Modified Polynucleotides for the Production of Nuclear Proteins; U.S. Provisional Patent Application No. 61/681,667, filed Aug. 10, 2012, entitled Modified Polynucleotides for the Production of Nuclear Proteins; U.S. Provisional Patent Application No. 61/737,168, filed Dec. 14, 2012, entitled Modified Polynucleotides for the Production of Nuclear Proteins; U.S. Provisional Patent Application No. 61/618,922, filed Apr. 2, 2012, entitled Modified Polynucleotides for the Production of Proteins; U.S. Provisional Patent Application No. 61/681,675, filed Aug. 10, 2012, entitled Modified Polynucleotides for the Production of Proteins; U.S. Provisional Patent Application No. 61/737,174, filed Dec. 14, 2012, entitled Modified Polynucleotides for the Production of Proteins; U.S. Provisional Patent Application No. 61/618,935, filed Apr. 2, 2012, entitled Modified Polynucleotides for the Production of Proteins Associated with Human Disease; U.S. Provisional Patent Application No. 61/681,687, filed Aug. 10, 2012, entitled Modified Polynucleotides for the Production of Proteins Associated with Human Disease; U.S. Provisional Patent Application No. 61/737,184, filed Dec. 14, 2012, entitled Modified Polynucleotides for the Production of Proteins Associated with Human Disease; U.S. Provisional Patent Application No. 61/618,945, filed Apr. 2, 2012, entitled Modified Polynucleotides for the Production of Proteins Associated with Human Disease; U.S. Provisional Patent Application No. 61/681,696, filed Aug. 10, 2012, entitled Modified Polynucleotides for the Production of Proteins Associated with Human Disease; U.S. Provisional Patent Application No. 61/737,191, filed Dec. 14, 2012, entitled Modified Polynucleotides for the Production of Proteins Associated with Human Disease; U.S. Provisional Patent Application No. 61/618,953, filed Apr. 2, 2012, entitled Modified Polynucleotides for the Production of Proteins Associated with Human Disease; U.S. Provisional Patent Application No. 61/681,704, filed Aug. 10, 2012, entitled Modified Polynucleotides for the Production of Proteins Associated with Human Disease; U.S. Provisional Patent Application No. 61/737,203, filed Dec. 14, 2012, entitled Modified Polynucleotides for the Production of Proteins Associated with Human Disease, U.S. Provisional Patent Application No. 61/753,661, entitled Polynucleotides For The Alteration Of Cellular Phenotypes And Microenvironments; International Application No PCT/US2013/030062, filed Mar. 9, 2013, entitled Modified Polynucleotides for the Production of Biologics and Proteins Associated with Human Disease; International Application No PCT/US2013/030063, filed Mar. 9, 2013, entitled Modified Polynucloetides; International Application No. PCT/US2013/030064, entitled Modified Polynucleotides for the Production of Secreted Proteins; International Application No PCT/US2013/030059, filed Mar. 9, 2013, entitled Modified Polynucleotides for the Production of Membrane Proteins; International Application No. PCT/US2013/030066, filed Mar. 9, 2013, entitled Modified Polynucleotides for the Production of Cytoplasmic and Cytoskeletal Proteins; International Application No. PCT/US2013/030067, filed Mar. 9, 2013, entitled Modified Polynucleotides for the Production of Nuclear Proteins; International Application No. PCT/US2013/030060, filed Mar. 9, 2013, entitled Modified Polynucleotides for the Production of Proteins; International Application No. PCT/US2013/030061, filed Mar. 9, 2013, entitled Modified Polynucleotides for the Production of Proteins Associated with Human Disease; International Application No. PCT/US2013/030068, filed Mar. 9, 2013, entitled Modified Polynucleotides for the Production of Cosmetic Proteins and Peptides; International Application No. PCT/US2013/030070, filed Mar. 9, 2013, entitled Modified Polynucleotides for the Production of Oncology-Related Proteins and Peptides; and International Application No. PCT/US2013/031821, filed Mar. 15, 2013, entitled In Vivo Production of Proteins, the contents of each of which are herein incorporated by reference in their entireties.

### Protein Cleavage Signals and Sites

[0339] In one embodiment, the polypeptides of the present invention may include at least one protein cleavage signal containing at least one protein cleavage site. The protein cleavage site may be located at the N-terminus, the C-terminus, at any space between the N- and the C-termini such as, but not limited to, half-way between the N- and C-termini, between the N-terminus and the half way point, between the half way point and the C-terminus, and combinations thereof.

[0340] The polypeptides of the present invention may include, but is not limited to, a proprotein convertase (or prohormone convertase), thrombin or Factor Xa protein cleavage signal. Proprotein convertases are a family of nine proteinases, comprising seven basic amino acid-specific subtilisin-like serine proteinases related to yeast kexin, known as prohormone convertase 1/3 (PC1/3), PC2, furin, PC4, PC5/6, paired basic amino-acid cleaving enzyme 4 (PACE4) and PC7, and two other subtilases that cleave at non-basic residues, called subtilisin kexin isozyme 1 (SKI-1) and proprotein convertase subtilisin kexin 9 (PCSK9). Non-limiting examples of protein cleavage signal amino acid sequences are listing in Table 10. In Table 10, “X” refers to any amino acid, “n” may be 0, 2, 4 or 6 amino acids and “*” refers to the protein cleavage site. In Table 10, SEQ ID NO: 162 refers to when n=4 and SEQ ID NO:163 refers to when n=6.

TABLE 10
Protein Cleavage Site Sequences

| Protein | | |
|---|---|---|
| Cleavage | | |
| Signal | Amino Acid Cleavage Sequence | SEQ ID NO |
| Proprotein | R-X-X-R* | 160 |
| convertase | R-X-K/R-R* | 161 |
| | K/R-Xn-K/R* | 162 or |
| | | 163 |
| Thrombin | L-V-P-R*-G-S | 164 |
| | L-V-P-R* | 165 |
| | A/F/G/I/L/T/V/M-A/F/G/I/ | 166 |
| | L/T/V/W/A-P-R* | |
| Factor Xa | I-E-G-R* | 167 |
| | I-D-G-R* | 168 |
| | A-E-G-R* | 169 |
| | A/F/G/I/L/T/V/M-D/E-G-R* | 170 |

[0341] In one embodiment, the primary constructs, modified nucleic acids and the mmRNA of the present invention may be engineered such that the primary construct, modified nucleic acid or mmRNA contains at least one encoded protein cleavage signal. The encoded protein cleavage signal may be located before the start codon, after the start codon, before the coding region, within the coding region such as, but not limited to, half way in the coding region, between the start codon and the half way point, between the half way point and the stop codon, after the coding region, before the stop codon, between two stop codons, after the stop codon and combinations thereof.

[0342] In one embodiment, the primary constructs, modified nucleic acids or mmRNA of the present invention may include at least one encoded protein cleavage signal containing at least one protein cleavage site. The encoded protein cleavage signal may include, but is not limited to, a proprotein convertase (or prohormone convertase), thrombin and/or Factor Xa protein cleavage signal. One of skill in the art may use Table 5 above or other known methods to determine the appropriate encoded protein cleavage signal to include in the primary constructs, modified nucleic acids or mmRNA of the present invention. For example, starting with the signal of Table 10 and considering the codons of Table 5 one can design a signal for the primary construct which can produce a protein signal in the resulting polypeptide.

[0343] In one embodiment, the polypeptides of the present invention include at least one protein cleavage signal and/or site.

[0344] As a non-limiting example, U.S. Pat. No. 7,374,930 and U.S. Pub. No. 20090227660, herein incorporated by reference in their entireties, use a furin cleavage site to cleave the N-terminal methionine of GLP-1 in the expression product from the Golgi apparatus of the cells. In one embodiment, the polypeptides of the present invention include at least one protein cleavage signal and/or site with the proviso that the polypeptide is not GLP-1.

[0345] In one embodiment, the primary constructs, modified nucleic acids or mmRNA of the present invention includes at least one encoded protein cleavage signal and/or site.

[0346] In one embodiment, the primary constructs, modified nucleic acid or mmRNA of the present invention includes at least one encoded protein cleavage signal and/or site with the proviso that the primary construct, modified nucleic acid or mmRNA does not encode GLP-1.

[0347] In one embodiment, the primary constructs, modified nucleic acid or mmRNA of the present invention may include more than one coding region. Where multiple coding regions are present in the primary construct, modified nucleic acid or mmRNA of the present invention, the multiple coding regions may be separated by encoded protein cleavage sites. As a non-limiting example, the primary construct, modified nucleic acid or mmRNA may be signed in an ordered pattern. On such pattern follows AXBY form where A and B are coding regions which may be the same or different coding regions and/or may encode the same or different polypeptides, and X and Y are encoded protein cleavage signals which may encode the same or different protein cleavage signals. A second such pattern follows the form AXYBZ where A and B are coding regions which may be the same or different coding regions and/or may encode the same or different polypeptides, and X, Y and Z are encoded protein cleavage signals which may encode the same or different protein cleavage signals. A third pattern follows the form ABXCY where A, B and C are coding regions which may be the same or different coding regions and/or may encode the same or different polypeptides, and X and Y are encoded protein cleavage signals which may encode the same or different protein cleavage signals.

[0348] In on embodiment, the polypeptides, primary constructs, modified nucleic acids and mmRNA can also contain sequences that encode protein cleavage sites so that the polypeptides, primary constructs, modified nucleic acids and mmRNA can be released from a carrier region or a fusion partner by treatment with a specific protease for said protein cleavage site.

[0349] Table 11 is a non-exhaustive listing of miRs and miR binding sites (miR BS) and their sequences which may be used with the present invention.

TABLE 11
Mirs and mir binding sites

| | mir | MIR BS |
|---|---|---|
| microRNA | SEQ ID | SEQ ID |
| hsa-let-7a-2-3p | 171 | 1192 |
| hsa-let-7a-3p | 172 | 1193 |
| hsa-let-7a-5p | 173 | 1194 |
| hsa-let-7b-3p | 174 | 1195 |
| hsa-let-7b-5p | 175 | 1196 |
| hsa-let-7c | 176 | 1197 |
| hsa-let-7d-3p | 177 | 1198 |
| hsa-let-7d-5p | 178 | 1199 |
| hsa-let-7e-3p | 179 | 1200 |
| hsa-let-7e-5p | 180 | 1201 |
| hsa-let-7f-1-3p | 181 | 1202 |
| hsa-let-7f-2-3p | 182 | 1203 |
| hsa-let-7f-5p | 183 | 1204 |
| hsa-let-7g-3p | 184 | 1205 |
| hsa-let-7g-5p | 185 | 1206 |
| hsa-let-7i-3p | 186 | 1207 |
| hsa-let-7i-5p | 187 | 1208 |
| hsa-miR-1 | 188 | 1209 |
| hsa-miR-100-3p | 189 | 1210 |
| hsa-miR-100-5p | 190 | 1211 |
| hsa-miR-101-3p | 191 | 1212 |
| hsa-miR-101-5p | 192 | 1213 |
| hsa-miR-103a-2-5p | 193 | 1214 |
| hsa-miR-103a-3p | 194 | 1215 |
| hsa-miR-103b | 195 | 1216 |
| hsa-miR-105-3p | 196 | 1217 |
| hsa-miR-105-5p | 197 | 1218 |
| hsa-miR-106a-3p | 198 | 1219 |
| hsa-miR-106a-5p | 199 | 1220 |
| hsa-miR-106b-3p | 200 | 1221 |
| hsa-miR-106b-5p | 201 | 1222 |
| hsa-miR-107 | 202 | 1223 |
| hsa-miR-10a-3p | 203 | 1224 |
| hsa-miR-10a-5p | 204 | 1225 |
| hsa-miR-10b-3p | 205 | 1226 |
| hsa-miR-10b-5p | 206 | 1227 |
| hsa-miR-1178-3p | 207 | 1228 |
| hsa-miR-1178-5p | 208 | 1229 |
| hsa-miR-1179 | 209 | 1230 |
| hsa-miR-1180 | 210 | 1231 |
| hsa-miR-1181 | 211 | 1232 |
| hsa-miR-1182 | 212 | 1233 |
| hsa-miR-1183 | 213 | 1234 |
| hsa-miR-1184 | 214 | 1235 |
| hsa-miR-1185-1-3p | 215 | 1236 |
| hsa-miR-1185-2-3p | 216 | 1237 |
| hsa-miR-1185-5p | 217 | 1238 |
| hsa-miR-1193 | 218 | 1239 |
| hsa-miR-1197 | 219 | 1240 |
| hsa-miR-1200 | 220 | 1241 |
| hsa-miR-1202 | 221 | 1242 |
| hsa-miR-1203 | 222 | 1243 |
| hsa-miR-1204 | 223 | 1244 |
| hsa-miR-1205 | 224 | 1245 |
| hsa-miR-1206 | 225 | 1246 |
| hsa-miR-1207-3p | 226 | 1247 |
| hsa-miR-1207-5p | 227 | 1248 |
| hsa-miR-1208 | 228 | 1249 |
| hsa-miR-122-3p | 229 | 1250 |
| hsa-miR-1224-3p | 230 | 1251 |
| hsa-miR-1224-5p | 231 | 1252 |
| hsa-miR-1225-3p | 232 | 1253 |
| hsa-miR-1225-5p | 233 | 1254 |
| hsa-miR-122-5p | 234 | 1255 |
| hsa-miR-1226-3p | 235 | 1256 |
| hsa-miR-1226-5p | 236 | 1257 |
| hsa-miR-1227-3p | 237 | 1258 |
| hsa-miR-1227-5p | 238 | 1259 |
| hsa-miR-1228-3p | 239 | 1260 |
| hsa-miR-1228-5p | 240 | 1261 |
| hsa-miR-1229-3p | 241 | 1262 |
| hsa-miR-1229-5p | 242 | 1263 |
| hsa-miR-1231 | 243 | 1264 |
| hsa-miR-1233-1-5p | 244 | 1265 |
| hsa-miR-1233-3p | 245 | 1266 |
| hsa-miR-1234-3p | 246 | 1267 |
| hsa-miR-1234-5p | 247 | 1268 |
| hsa-miR-1236-3p | 248 | 1269 |
| hsa-miR-1236-5p | 249 | 1270 |
| hsa-miR-1237-3p | 250 | 1271 |
| hsa-miR-1237-5p | 251 | 1272 |
| hsa-miR-1238-3p | 252 | 1273 |
| hsa-miR-1238-5p | 253 | 1274 |
| hsa-miR-1243 | 254 | 1275 |
| hsa-miR-124-3p | 255 | 1276 |
| hsa-miR-1244 | 256 | 1277 |
| hsa-miR-1245a | 257 | 1278 |
| hsa-miR-1245b-3p | 258 | 1279 |
| hsa-miR-1245b-5p | 259 | 1280 |
| hsa-miR-124-5p | 260 | 1281 |
| hsa-miR-1246 | 261 | 1282 |
| hsa-miR-1247-3p | 262 | 1283 |
| hsa-miR-1247-5p | 263 | 1284 |
| hsa-miR-1248 | 264 | 1285 |
| hsa-miR-1249 | 265 | 1286 |
| hsa-miR-1250 | 266 | 1287 |
| hsa-miR-1251 | 267 | 1288 |
| hsa-miR-1252 | 268 | 1289 |
| hsa-miR-1253 | 269 | 1290 |
| hsa-miR-1254 | 270 | 1291 |
| hsa-miR-1255a | 271 | 1292 |
| hsa-miR-1255b-2-3p | 272 | 1293 |
| hsa-miR-1255b-5p | 273 | 1294 |
| hsa-miR-1256 | 274 | 1295 |
| hsa-miR-1257 | 275 | 1296 |
| hsa-miR-1258 | 276 | 1297 |
| hsa-miR-125a-3p | 277 | 1298 |
| hsa-miR-125a-5p | 278 | 1299 |
| hsa-miR-125b-1-3p | 279 | 1300 |
| hsa-miR-125b-2-3p | 280 | 1301 |
| hsa-miR-125b-5p | 281 | 1302 |
| hsa-miR-1260a | 282 | 1303 |
| hsa-miR-1260b | 283 | 1304 |
| hsa-miR-1261 | 284 | 1305 |
| hsa-miR-1262 | 285 | 1306 |
| hsa-miR-1263 | 286 | 1307 |
| hsa-miR-126-3p | 287 | 1308 |
| hsa-miR-1264 | 288 | 1309 |
| hsa-miR-1265 | 289 | 1310 |
| hsa-miR-126-5p | 290 | 1311 |
| hsa-miR-1266 | 291 | 1312 |
| hsa-miR-1267 | 292 | 1313 |
| hsa-miR-1268a | 293 | 1314 |
| hsa-miR-1268b | 294 | 1315 |
| hsa-miR-1269a | 295 | 1316 |
| hsa-miR-1269b | 296 | 1317 |
| hsa-miR-1270 | 297 | 1318 |
| hsa-miR-1271-3p | 298 | 1319 |
| hsa-miR-1271-5p | 299 | 1320 |
| hsa-miR-1272 | 300 | 1321 |
| hsa-miR-1273a | 301 | 1322 |
| hsa-miR-1273c | 302 | 1323 |
| hsa-miR-1273d | 303 | 1324 |
| hsa-miR-1273e | 304 | 1325 |
| hsa-miR-1273f | 305 | 1326 |
| hsa-miR-1273g-3p | 306 | 1327 |
| hsa-miR-1273g-5p | 307 | 1328 |
| hsa-miR-127-3p | 308 | 1329 |
| hsa-miR-1275 | 309 | 1330 |
| hsa-miR-127-5p | 310 | 1331 |
| hsa-miR-1276 | 311 | 1332 |
| hsa-miR-1277-3p | 312 | 1333 |
| hsa-miR-1277-5p | 313 | 1334 |
| hsa-miR-1278 | 314 | 1335 |
| hsa-miR-1279 | 315 | 1336 |
| hsa-miR-128 | 316 | 1337 |
| hsa-miR-1281 | 317 | 1338 |
| hsa-miR-1282 | 318 | 1339 |
| hsa-miR-1283 | 319 | 1340 |
| hsa-miR-1284 | 320 | 1341 |
| hsa-miR-1285-3p | 321 | 1342 |
| hsa-miR-1285-5p | 322 | 1343 |
| hsa-miR-1286 | 323 | 1344 |
| hsa-miR-1287 | 324 | 1345 |
| hsa-miR-1288 | 325 | 1346 |
| hsa-miR-1289 | 326 | 1347 |
| hsa-miR-1290 | 327 | 1348 |
| hsa-miR-1291 | 328 | 1349 |
| hsa-miR-129-1-3p | 329 | 1350 |
| hsa-miR-1292-3p | 330 | 1351 |
| hsa-miR-129-2-3p | 331 | 1352 |
| hsa-miR-1292-5p | 332 | 1353 |
| hsa-miR-1293 | 333 | 1354 |
| hsa-miR-1294 | 334 | 1355 |
| hsa-miR-1295a | 335 | 1356 |
| hsa-miR-1295b-3p | 336 | 1357 |
| hsa-miR-1295b-5p | 337 | 1358 |
| hsa-miR-129-5p | 338 | 1359 |
| hsa-miR-1296 | 339 | 1360 |
| hsa-miR-1297 | 340 | 1361 |
| hsa-miR-1298 | 341 | 1362 |
| hsa-miR-1299 | 342 | 1363 |
| hsa-miR-1301 | 343 | 1364 |
| hsa-miR-1302 | 344 | 1365 |
| hsa-miR-1303 | 345 | 1366 |
| hsa-miR-1304-3p | 346 | 1367 |
| hsa-miR-1304-5p | 347 | 1368 |
| hsa-miR-1305 | 348 | 1369 |
| hsa-miR-1306-3p | 349 | 1370 |
| hsa-miR-1306-5p | 350 | 1371 |
| hsa-miR-1307-3p | 351 | 1372 |
| hsa-miR-1307-5p | 352 | 1373 |
| hsa-miR-130a-3p | 353 | 1374 |
| hsa-miR-130a-5p | 354 | 1375 |
| hsa-miR-130b-3p | 355 | 1376 |
| hsa-miR-130b-5p | 356 | 1377 |
| hsa-miR-1321 | 357 | 1378 |
| hsa-miR-1322 | 358 | 1379 |
| hsa-miR-1323 | 359 | 1380 |
| hsa-miR-132-3p | 360 | 1381 |
| hsa-miR-1324 | 361 | 1382 |
| hsa-miR-132-5p | 362 | 1383 |
| hsa-miR-133a | 363 | 1384 |
| hsa-miR-133b | 364 | 1385 |
| hsa-miR-134 | 365 | 1386 |
| hsa-miR-1343 | 366 | 1387 |
| hsa-miR-135a-3p | 367 | 1388 |
| hsa-miR-135a-5p | 368 | 1389 |
| hsa-miR-135b-3p | 369 | 1390 |
| hsa-miR-135b-5p | 370 | 1391 |
| hsa-miR-136-3p | 371 | 1392 |
| hsa-miR-136-5p | 372 | 1393 |
| hsa-miR-137 | 373 | 1394 |
| hsa-miR-138-1-3p | 374 | 1395 |
| hsa-miR-138-2-3p | 375 | 1396 |
| hsa-miR-138-5p | 376 | 1397 |
| hsa-miR-139-3p | 377 | 1398 |
| hsa-miR-139-5p | 378 | 1399 |
| hsa-miR-140-3p | 379 | 1400 |
| hsa-miR-140-5p | 380 | 1401 |
| hsa-miR-141-3p | 381 | 1402 |
| hsa-miR-141-5p | 382 | 1403 |
| hsa-miR-142-3p | 383 | 1404 |
| hsa-miR-142-5p | 384 | 1405 |
| hsa-miR-143-3p | 385 | 1406 |
| hsa-miR-143-5p | 386 | 1407 |
| hsa-miR-144-3p | 387 | 1408 |
| hsa-miR-144-5p | 388 | 1409 |
| hsa-miR-145-3p | 389 | 1410 |
| hsa-miR-145-5p | 390 | 1411 |
| hsa-miR-1468 | 391 | 1412 |
| hsa-miR-1469 | 392 | 1413 |
| hsa-miR-146a-3p | 393 | 1414 |
| hsa-miR-146a-5p | 394 | 1415 |
| hsa-miR-146b-3p | 395 | 1416 |
| hsa-miR-146b-5p | 396 | 1417 |
| hsa-miR-1470 | 397 | 1418 |
| hsa-miR-1471 | 398 | 1419 |
| hsa-miR-147a | 399 | 1420 |
| hsa-miR-147b | 400 | 1421 |
| hsa-miR-148a-3p | 401 | 1422 |
| hsa-miR-148a-5p | 402 | 1423 |
| hsa-miR-148b-3p | 403 | 1424 |
| hsa-miR-148b-5p | 404 | 1425 |
| hsa-miR-149-3p | 405 | 1426 |
| hsa-miR-149-5p | 406 | 1427 |
| hsa-miR-150-3p | 407 | 1428 |
| hsa-miR-150-5p | 408 | 1429 |
| hsa-miR-151a-3p | 409 | 1430 |
| hsa-miR-151a-5p | 410 | 1431 |
| hsa-miR-151b | 411 | 1432 |
| hsa-miR-152 | 412 | 1433 |
| hsa-miR-153 | 413 | 1434 |
| hsa-miR-1537 | 414 | 1435 |
| hsa-miR-1538 | 415 | 1436 |
| hsa-miR-1539 | 416 | 1437 |
| hsa-miR-154-3p | 417 | 1438 |
| hsa-miR-154-5p | 418 | 1439 |
| hsa-miR-155-3p | 419 | 1440 |
| hsa-miR-155-5p | 420 | 1441 |
| hsa-miR-1587 | 421 | 1442 |
| hsa-miR-15a-3p | 422 | 1443 |
| hsa-miR-15a-5p | 423 | 1444 |
| hsa-miR-15b-3p | 424 | 1445 |
| hsa-miR-15b-5p | 425 | 1446 |
| hsa-miR-16-1-3p | 426 | 1447 |
| hsa-miR-16-2-3p | 427 | 1448 |
| hsa-miR-16-5p | 428 | 1449 |
| hsa-miR-17-3p | 429 | 1450 |
| hsa-miR-17-5p | 430 | 1451 |
| hsa-miR-181a-2-3p | 431 | 1452 |
| hsa-miR-181a-3p | 432 | 1453 |
| hsa-miR-181a-5p | 433 | 1454 |
| hsa-miR-181b-3p | 434 | 1455 |
| hsa-miR-181b-5p | 435 | 1456 |
| hsa-miR-181c-3p | 436 | 1457 |
| hsa-miR-181c-5p | 437 | 1458 |
| hsa-miR-181d | 438 | 1459 |
| hsa-miR-182-3p | 439 | 1460 |
| hsa-miR-1825 | 440 | 1461 |
| hsa-miR-182-5p | 441 | 1462 |
| hsa-miR-1827 | 442 | 1463 |
| hsa-miR-183-3p | 443 | 1464 |
| hsa-miR-183-5p | 444 | 1465 |
| hsa-miR-184 | 445 | 1466 |
| hsa-miR-185-3p | 446 | 1467 |
| hsa-miR-185-5p | 447 | 1468 |
| hsa-miR-186-3p | 448 | 1469 |
| hsa-miR-186-5p | 449 | 1470 |
| hsa-miR-187-3p | 450 | 1471 |
| hsa-miR-187-5p | 451 | 1472 |
| hsa-miR-188-3p | 452 | 1473 |
| hsa-miR-188-5p | 453 | 1474 |
| hsa-miR-18a-3p | 454 | 1475 |
| hsa-miR-18a-5p | 455 | 1476 |
| hsa-miR-18b-3p | 456 | 1477 |
| hsa-miR-18b-5p | 457 | 1478 |
| hsa-miR-1908 | 458 | 1479 |
| hsa-miR-1909-3p | 459 | 1480 |
| hsa-miR-1909-5p | 460 | 1481 |
| hsa-miR-190a | 461 | 1482 |
| hsa-miR-190b | 462 | 1483 |
| hsa-miR-1910 | 463 | 1484 |
| hsa-miR-1911-3p | 464 | 1485 |
| hsa-miR-1911-5p | 465 | 1486 |
| hsa-miR-1912 | 466 | 1487 |
| hsa-miR-1913 | 467 | 1488 |
| hsa-miR-191-3p | 468 | 1489 |
| hsa-miR-1914-3p | 469 | 1490 |
| hsa-miR-1914-5p | 470 | 1491 |
| hsa-miR-1915-3p | 471 | 1492 |
| hsa-miR-1915-5p | 472 | 1493 |
| hsa-miR-191-5p | 473 | 1494 |
| hsa-miR-192-3p | 474 | 1495 |
| hsa-miR-192-5p | 475 | 1496 |
| hsa-miR-193a-3p | 476 | 1497 |
| hsa-miR-193a-5p | 477 | 1498 |
| hsa-miR-193b-3p | 478 | 1499 |
| hsa-miR-193b-5p | 479 | 1500 |
| hsa-miR-194-3p | 480 | 1501 |
| hsa-miR-194-5p | 481 | 1502 |
| hsa-miR-195-3p | 482 | 1503 |
| hsa-miR-195-5p | 483 | 1504 |
| hsa-miR-196a-3p | 484 | 1505 |
| hsa-miR-196a-5p | 485 | 1506 |
| hsa-miR-196b-3p | 486 | 1507 |
| hsa-miR-196b-5p | 487 | 1508 |
| hsa-miR-1972 | 488 | 1509 |
| hsa-miR-1973 | 489 | 1510 |
| hsa-miR-197-3p | 490 | 1511 |
| hsa-miR-197-5p | 491 | 1512 |
| hsa-miR-1976 | 492 | 1513 |
| hsa-miR-198 | 493 | 1514 |
| hsa-miR-199a-3p | 494 | 1515 |
| hsa-miR-199a-5p | 495 | 1516 |
| hsa-miR-199b-3p | 496 | 1517 |
| hsa-miR-199b-5p | 497 | 1518 |
| hsa-miR-19a-3p | 498 | 1519 |
| hsa-miR-19a-5p | 499 | 1520 |
| hsa-miR-19b-1-5p | 500 | 1521 |
| hsa-miR-19b-2-5p | 501 | 1522 |
| hsa-miR-19b-3p | 502 | 1523 |
| hsa-miR-200a-3p | 503 | 1524 |
| hsa-miR-200a-5p | 504 | 1525 |
| hsa-miR-200b-3p | 505 | 1526 |
| hsa-miR-200b-5p | 506 | 1527 |
| hsa-miR-200c-3p | 507 | 1528 |
| hsa-miR-200c-5p | 508 | 1529 |
| hsa-miR-202-3p | 509 | 1530 |
| hsa-miR-202-5p | 510 | 1531 |
| hsa-miR-203a | 511 | 1532 |
| hsa-miR-203b-3p | 512 | 1533 |
| hsa-miR-203b-5p | 513 | 1534 |
| hsa-miR-204-3p | 514 | 1535 |
| hsa-miR-204-5p | 515 | 1536 |
| hsa-miR-2052 | 516 | 1537 |
| hsa-miR-2053 | 517 | 1538 |
| hsa-miR-205-3p | 518 | 1539 |
| hsa-miR-2054 | 519 | 1540 |
| hsa-miR-205-5p | 520 | 1541 |
| hsa-miR-206 | 521 | 1542 |
| hsa-miR-208a | 522 | 1543 |
| hsa-miR-208b | 523 | 1544 |
| hsa-miR-20a-3p | 524 | 1545 |
| hsa-miR-20a-5p | 525 | 1546 |
| hsa-miR-20b-3p | 526 | 1547 |
| hsa-miR-20b-5p | 527 | 1548 |
| hsa-miR-210 | 528 | 1549 |
| hsa-miR-2110 | 529 | 1550 |
| hsa-miR-2113 | 530 | 1551 |
| hsa-miR-211-3p | 531 | 1552 |
| hsa-miR-2114-3p | 532 | 1553 |
| hsa-miR-2114-5p | 533 | 1554 |
| hsa-miR-2115-3p | 534 | 1555 |
| hsa-miR-2115-5p | 535 | 1556 |
| hsa-miR-211-5p | 536 | 1557 |
| hsa-miR-2116-3p | 537 | 1558 |
| hsa-miR-2116-5p | 538 | 1559 |
| hsa-miR-2117 | 539 | 1560 |
| hsa-miR-212-3p | 540 | 1561 |
| hsa-miR-212-5p | 541 | 1562 |
| hsa-miR-21-3p | 542 | 1563 |
| hsa-miR-214-3p | 543 | 1564 |
| hsa-miR-214-5p | 544 | 1565 |
| hsa-miR-215 | 545 | 1566 |
| hsa-miR-21-5p | 546 | 1567 |
| hsa-miR-216a-3p | 547 | 1568 |
| hsa-miR-216a-5p | 548 | 1569 |
| hsa-miR-216b | 549 | 1570 |
| hsa-miR-217 | 550 | 1571 |
| hsa-miR-218-1-3p | 551 | 1572 |
| hsa-miR-218-2-3p | 552 | 1573 |
| hsa-miR-218-5p | 553 | 1574 |
| hsa-miR-219-1-3p | 554 | 1575 |
| hsa-miR-219-2-3p | 555 | 1576 |
| hsa-miR-219-5p | 556 | 1577 |
| hsa-miR-221-3p | 557 | 1578 |
| hsa-miR-221-5p | 558 | 1579 |
| hsa-miR-222-3p | 559 | 1580 |
| hsa-miR-222-5p | 560 | 1581 |
| hsa-miR-223-3p | 561 | 1582 |
| hsa-miR-223-5p | 562 | 1583 |
| hsa-miR-22-3p | 563 | 1584 |
| hsa-miR-224-3p | 564 | 1585 |
| hsa-miR-224-5p | 565 | 1586 |
| hsa-miR-22-5p | 566 | 1587 |
| hsa-miR-2276 | 567 | 1588 |
| hsa-miR-2277-3p | 568 | 1589 |
| hsa-miR-2277-5p | 569 | 1590 |
| hsa-miR-2278 | 570 | 1591 |
| hsa-miR-2355-3p | 571 | 1592 |
| hsa-miR-2355-5p | 572 | 1593 |
| hsa-miR-2392 | 573 | 1594 |
| hsa-miR-23a-3p | 574 | 1595 |
| hsa-miR-23a-5p | 575 | 1596 |
| hsa-miR-23b-3p | 576 | 1597 |
| hsa-miR-23b-5p | 577 | 1598 |
| hsa-miR-23c | 578 | 1599 |
| hsa-miR-24-1-5p | 579 | 1600 |
| hsa-miR-24-2-5p | 580 | 1601 |
| hsa-miR-24-3p | 581 | 1602 |
| hsa-miR-2467-3p | 582 | 1603 |
| hsa-miR-2467-5p | 583 | 1604 |
| hsa-miR-25-3p | 584 | 1605 |
| hsa-miR-25-5p | 585 | 1606 |
| hsa-miR-2681-3p | 586 | 1607 |
| hsa-miR-2681-5p | 587 | 1608 |
| hsa-miR-2682-3p | 588 | 1609 |
| hsa-miR-2682-5p | 589 | 1610 |
| hsa-miR-26a-1-3p | 590 | 1611 |
| hsa-miR-26a-2-3p | 591 | 1612 |
| hsa-miR-26a-5p | 592 | 1613 |
| hsa-miR-26b-3p | 593 | 1614 |
| hsa-miR-26b-5p | 594 | 1615 |
| hsa-miR-27a-3p | 595 | 1616 |
| hsa-miR-27a-5p | 596 | 1617 |
| hsa-miR-27b-3p | 597 | 1618 |
| hsa-miR-27b-5p | 598 | 1619 |
| hsa-miR-28-3p | 599 | 1620 |
| hsa-miR-28-5p | 600 | 1621 |
| hsa-miR-2861 | 601 | 1622 |
| hsa-miR-2909 | 602 | 1623 |
| hsa-miR-296-3p | 603 | 1624 |
| hsa-miR-2964a-3p | 604 | 1625 |
| hsa-miR-2964a-5p | 605 | 1626 |
| hsa-miR-296-5p | 606 | 1627 |
| hsa-miR-297 | 607 | 1628 |
| hsa-miR-298 | 608 | 1629 |
| hsa-miR-299-3p | 609 | 1630 |
| hsa-miR-299-5p | 610 | 1631 |
| hsa-miR-29a-3p | 611 | 1632 |
| hsa-miR-29a-5p | 612 | 1633 |
| hsa-miR-29b-1-5p | 613 | 1634 |
| hsa-miR-29b-2-5p | 614 | 1635 |
| hsa-miR-29b-3p | 615 | 1636 |
| hsa-miR-29c-3p | 616 | 1637 |
| hsa-miR-29c-5p | 617 | 1638 |
| hsa-miR-300 | 618 | 1639 |
| hsa-miR-301a-3p | 619 | 1640 |
| hsa-miR-301a-5p | 620 | 1641 |
| hsa-miR-301b | 621 | 1642 |
| hsa-miR-302a-3p | 622 | 1643 |
| hsa-miR-302a-5p | 623 | 1644 |
| hsa-miR-302b-3p | 624 | 1645 |
| hsa-miR-302b-5p | 625 | 1646 |
| hsa-miR-302c-3p | 626 | 1647 |
| hsa-miR-302c-5p | 627 | 1648 |
| hsa-miR-302d-3p | 628 | 1649 |
| hsa-miR-302d-5p | 629 | 1650 |
| hsa-miR-302e | 630 | 1651 |
| hsa-miR-302f | 631 | 1652 |
| hsa-miR-3064-3p | 632 | 1653 |
| hsa-miR-3064-5p | 633 | 1654 |
| hsa-miR-3065-3p | 634 | 1655 |
| hsa-miR-3065-5p | 635 | 1656 |
| hsa-miR-3074-3p | 636 | 1657 |
| hsa-miR-3074-5p | 637 | 1658 |
| hsa-miR-30a-3p | 638 | 1659 |
| hsa-miR-30a-5p | 639 | 1660 |
| hsa-miR-30b-3p | 640 | 1661 |
| hsa-miR-30b-5p | 641 | 1662 |
| hsa-miR-30c-1-3p | 642 | 1663 |
| hsa-miR-30c-2-3p | 643 | 1664 |
| hsa-miR-30c-5p | 644 | 1665 |
| hsa-miR-30d-3p | 645 | 1666 |
| hsa-miR-30d-5p | 646 | 1667 |
| hsa-miR-30e-3p | 647 | 1668 |
| hsa-miR-30e-5p | 648 | 1669 |
| hsa-miR-3115 | 649 | 1670 |
| hsa-miR-3116 | 650 | 1671 |
| hsa-miR-3117-3p | 651 | 1672 |
| hsa-miR-3117-5p | 652 | 1673 |
| hsa-miR-3118 | 653 | 1674 |
| hsa-miR-3119 | 654 | 1675 |
| hsa-miR-3120-3p | 655 | 1676 |
| hsa-miR-3120-5p | 656 | 1677 |
| hsa-miR-3121-3p | 657 | 1678 |
| hsa-miR-3121-5p | 658 | 1679 |
| hsa-miR-3122 | 659 | 1680 |
| hsa-miR-3123 | 660 | 1681 |
| hsa-miR-3124-3p | 661 | 1682 |
| hsa-miR-3124-5p | 662 | 1683 |
| hsa-miR-3125 | 663 | 1684 |
| hsa-miR-3126-3p | 664 | 1685 |
| hsa-miR-3126-5p | 665 | 1686 |
| hsa-miR-3127-3p | 666 | 1687 |
| hsa-miR-3127-5p | 667 | 1688 |
| hsa-miR-3128 | 668 | 1689 |
| hsa-miR-3129-3p | 669 | 1690 |
| hsa-miR-3129-5p | 670 | 1691 |
| hsa-miR-3130-3p | 671 | 1692 |
| hsa-miR-3130-5p | 672 | 1693 |
| hsa-miR-3131 | 673 | 1694 |
| hsa-miR-3132 | 674 | 1695 |
| hsa-miR-3133 | 675 | 1696 |
| hsa-miR-3134 | 676 | 1697 |
| hsa-miR-3135a | 677 | 1698 |
| hsa-miR-3135b | 678 | 1699 |
| hsa-miR-3136-3p | 679 | 1700 |
| hsa-miR-3136-5p | 680 | 1701 |
| hsa-miR-3137 | 681 | 1702 |
| hsa-miR-3138 | 682 | 1703 |
| hsa-miR-3139 | 683 | 1704 |
| hsa-miR-31-3p | 684 | 1705 |
| hsa-miR-3140-3p | 685 | 1706 |
| hsa-miR-3140-5p | 686 | 1707 |
| hsa-miR-3141 | 687 | 1708 |
| hsa-miR-3142 | 688 | 1709 |
| hsa-miR-3143 | 689 | 1710 |
| hsa-miR-3144-3p | 690 | 1711 |
| hsa-miR-3144-5p | 691 | 1712 |
| hsa-miR-3145-3p | 692 | 1713 |
| hsa-miR-3145-5p | 693 | 1714 |
| hsa-miR-3146 | 694 | 1715 |
| hsa-miR-3147 | 695 | 1716 |
| hsa-miR-3148 | 696 | 1717 |
| hsa-miR-3149 | 697 | 1718 |
| hsa-miR-3150a-3p | 698 | 1719 |
| hsa-miR-3150a-5p | 699 | 1720 |
| hsa-miR-3150b-3p | 700 | 1721 |
| hsa-miR-3150b-5p | 701 | 1722 |
| hsa-miR-3151 | 702 | 1723 |
| hsa-miR-3152-3p | 703 | 1724 |
| hsa-miR-3152-5p | 704 | 1725 |
| hsa-miR-3153 | 705 | 1726 |
| hsa-miR-3154 | 706 | 1727 |
| hsa-miR-3155a | 707 | 1728 |
| hsa-miR-3155b | 708 | 1729 |
| hsa-miR-3156-3p | 709 | 1730 |
| hsa-miR-3156-5p | 710 | 1731 |
| hsa-miR-3157-3p | 711 | 1732 |
| hsa-miR-3157-5p | 712 | 1733 |
| hsa-miR-3158-3p | 713 | 1734 |
| hsa-miR-3158-5p | 714 | 1735 |
| hsa-miR-3159 | 715 | 1736 |
| hsa-miR-31-5p | 716 | 1737 |
| hsa-miR-3160-3p | 717 | 1738 |
| hsa-miR-3160-5p | 718 | 1739 |
| hsa-miR-3161 | 719 | 1740 |
| hsa-miR-3162-3p | 720 | 1741 |
| hsa-miR-3162-5p | 721 | 1742 |
| hsa-miR-3163 | 722 | 1743 |
| hsa-miR-3164 | 723 | 1744 |
| hsa-miR-3165 | 724 | 1745 |
| hsa-miR-3166 | 725 | 1746 |
| hsa-miR-3167 | 726 | 1747 |
| hsa-miR-3168 | 727 | 1748 |
| hsa-miR-3169 | 728 | 1749 |
| hsa-miR-3170 | 729 | 1750 |
| hsa-miR-3171 | 730 | 1751 |
| hsa-miR-3173-3p | 731 | 1752 |
| hsa-miR-3173-5p | 732 | 1753 |
| hsa-miR-3174 | 733 | 1754 |
| hsa-miR-3175 | 734 | 1755 |
| hsa-miR-3176 | 735 | 1756 |
| hsa-miR-3177-3p | 736 | 1757 |
| hsa-miR-3177-5p | 737 | 1758 |
| hsa-miR-3178 | 738 | 1759 |
| hsa-miR-3179 | 739 | 1760 |
| hsa-miR-3180 | 740 | 1761 |
| hsa-miR-3180-3p | 741 | 1762 |
| hsa-miR-3180-5p | 742 | 1763 |
| hsa-miR-3181 | 743 | 1764 |
| hsa-miR-3182 | 744 | 1765 |
| hsa-miR-3183 | 745 | 1766 |
| hsa-miR-3184-3p | 746 | 1767 |
| hsa-miR-3184-5p | 747 | 1768 |
| hsa-miR-3185 | 748 | 1769 |
| hsa-miR-3186-3p | 749 | 1770 |
| hsa-miR-3186-5p | 750 | 1771 |
| hsa-miR-3187-3p | 751 | 1772 |
| hsa-miR-3187-5p | 752 | 1773 |
| hsa-miR-3188 | 753 | 1774 |
| hsa-miR-3189-3p | 754 | 1775 |
| hsa-miR-3189-5p | 755 | 1776 |
| hsa-miR-3190-3p | 756 | 1777 |
| hsa-miR-3190-5p | 757 | 1778 |
| hsa-miR-3191-3p | 758 | 1779 |
| hsa-miR-3191-5p | 759 | 1780 |
| hsa-miR-3192 | 760 | 1781 |
| hsa-miR-3193 | 761 | 1782 |
| hsa-miR-3194-3p | 762 | 1783 |
| hsa-miR-3194-5p | 763 | 1784 |
| hsa-miR-3195 | 764 | 1785 |
| hsa-miR-3196 | 765 | 1786 |
| hsa-miR-3197 | 766 | 1787 |
| hsa-miR-3198 | 767 | 1788 |
| hsa-miR-3199 | 768 | 1789 |
| hsa-miR-3200-3p | 769 | 1790 |
| hsa-miR-3200-5p | 770 | 1791 |
| hsa-miR-3201 | 771 | 1792 |
| hsa-miR-3202 | 772 | 1793 |
| hsa-miR-320a | 773 | 1794 |
| hsa-miR-320b | 774 | 1795 |
| hsa-miR-320c | 775 | 1796 |
| hsa-miR-320d | 776 | 1797 |
| hsa-miR-320e | 777 | 1798 |
| hsa-miR-323a-3p | 778 | 1799 |
| hsa-miR-323a-5p | 779 | 1800 |
| hsa-miR-323b-3p | 780 | 1801 |
| hsa-miR-323b-5p | 781 | 1802 |
| hsa-miR-32-3p | 782 | 1803 |
| hsa-miR-324-3p | 783 | 1804 |
| hsa-miR-324-5p | 784 | 1805 |
| hsa-miR-325 | 785 | 1806 |
| hsa-miR-32-5p | 786 | 1807 |
| hsa-miR-326 | 787 | 1808 |
| hsa-miR-328 | 788 | 1809 |
| hsa-miR-329 | 789 | 1810 |
| hsa-miR-330-3p | 790 | 1811 |
| hsa-miR-330-5p | 791 | 1812 |
| hsa-miR-331-3p | 792 | 1813 |
| hsa-miR-331-5p | 793 | 1814 |
| hsa-miR-335-3p | 794 | 1815 |
| hsa-miR-335-5p | 795 | 1816 |
| hsa-miR-337-3p | 796 | 1817 |
| hsa-miR-337-5p | 797 | 1818 |
| hsa-miR-338-3p | 798 | 1819 |
| hsa-miR-338-5p | 799 | 1820 |
| hsa-miR-339-3p | 800 | 1821 |
| hsa-miR-339-5p | 801 | 1822 |
| hsa-miR-33a-3p | 802 | 1823 |
| hsa-miR-33a-5p | 803 | 1824 |
| hsa-miR-33b-3p | 804 | 1825 |
| hsa-miR-33b-5p | 805 | 1826 |
| hsa-miR-340-3p | 806 | 1827 |
| hsa-miR-340-5p | 807 | 1828 |
| hsa-miR-342-3p | 808 | 1829 |
| hsa-miR-342-5p | 809 | 1830 |
| hsa-miR-345-3p | 810 | 1831 |
| hsa-miR-345-5p | 811 | 1832 |
| hsa-miR-346 | 812 | 1833 |
| hsa-miR-34a-3p | 813 | 1834 |
| hsa-miR-34a-5p | 814 | 1835 |
| hsa-miR-34b-3p | 815 | 1836 |
| hsa-miR-34b-5p | 816 | 1837 |
| hsa-miR-34c-3p | 817 | 1838 |
| hsa-miR-34c-5p | 818 | 1839 |
| hsa-miR-3529-3p | 819 | 1840 |
| hsa-miR-3529-5p | 820 | 1841 |
| hsa-miR-3591-3p | 821 | 1842 |
| hsa-miR-3591-5p | 822 | 1843 |
| hsa-miR-3605-3p | 823 | 1844 |
| hsa-miR-3605-5p | 824 | 1845 |
| hsa-miR-3606-3p | 825 | 1846 |
| hsa-miR-3606-5p | 826 | 1847 |
| hsa-miR-3607-3p | 827 | 1848 |
| hsa-miR-3607-5p | 828 | 1849 |
| hsa-miR-3609 | 829 | 1850 |
| hsa-miR-3610 | 830 | 1851 |
| hsa-miR-3611 | 831 | 1852 |
| hsa-miR-3612 | 832 | 1853 |
| hsa-miR-3613-3p | 833 | 1854 |
| hsa-miR-3613-5p | 834 | 1855 |
| hsa-miR-361-3p | 835 | 1856 |
| hsa-miR-3614-3p | 836 | 1857 |
| hsa-miR-3614-5p | 837 | 1858 |
| hsa-miR-3615 | 838 | 1859 |
| hsa-miR-361-5p | 839 | 1860 |
| hsa-miR-3616-3p | 840 | 1861 |
| hsa-miR-3616-5p | 841 | 1862 |
| hsa-miR-3617-3p | 842 | 1863 |
| hsa-miR-3617-5p | 843 | 1864 |
| hsa-miR-3618 | 844 | 1865 |
| hsa-miR-3619-3p | 845 | 1866 |
| hsa-miR-3619-5p | 846 | 1867 |
| hsa-miR-3620-3p | 847 | 1868 |
| hsa-miR-3620-5p | 848 | 1869 |
| hsa-miR-3621 | 849 | 1870 |
| hsa-miR-3622a-3p | 850 | 1871 |
| hsa-miR-3622a-5p | 851 | 1872 |
| hsa-miR-3622b-3p | 852 | 1873 |
| hsa-miR-3622b-5p | 853 | 1874 |
| hsa-miR-362-3p | 854 | 1875 |
| hsa-miR-362-5p | 855 | 1876 |
| hsa-miR-363-3p | 856 | 1877 |
| hsa-miR-363-5p | 857 | 1878 |
| hsa-miR-3646 | 858 | 1879 |
| hsa-miR-3648 | 859 | 1880 |
| hsa-miR-3649 | 860 | 1881 |
| hsa-miR-3650 | 861 | 1882 |
| hsa-miR-3651 | 862 | 1883 |
| hsa-miR-3652 | 863 | 1884 |
| hsa-miR-3653 | 864 | 1885 |
| hsa-miR-3654 | 865 | 1886 |
| hsa-miR-3655 | 866 | 1887 |
| hsa-miR-3656 | 867 | 1888 |
| hsa-miR-3657 | 868 | 1889 |
| hsa-miR-3658 | 869 | 1890 |
| hsa-miR-3659 | 870 | 1891 |
| hsa-miR-365a-3p | 871 | 1892 |
| hsa-miR-365a-5p | 872 | 1893 |
| hsa-miR-365b-3p | 873 | 1894 |
| hsa-miR-365b-5p | 874 | 1895 |
| hsa-miR-3660 | 875 | 1896 |
| hsa-miR-3661 | 876 | 1897 |
| hsa-miR-3662 | 877 | 1898 |
| hsa-miR-3663-3p | 878 | 1899 |
| hsa-miR-3663-5p | 879 | 1900 |
| hsa-miR-3664-3p | 880 | 1901 |
| hsa-miR-3664-5p | 881 | 1902 |
| hsa-miR-3665 | 882 | 1903 |
| hsa-miR-3666 | 883 | 1904 |
| hsa-miR-3667-3p | 884 | 1905 |
| hsa-miR-3667-5p | 885 | 1906 |
| hsa-miR-3668 | 886 | 1907 |
| hsa-miR-3669 | 887 | 1908 |
| hsa-miR-3670 | 888 | 1909 |
| hsa-miR-3671 | 889 | 1910 |
| hsa-miR-3672 | 890 | 1911 |
| hsa-miR-3673 | 891 | 1912 |
| hsa-miR-367-3p | 892 | 1913 |
| hsa-miR-3674 | 893 | 1914 |
| hsa-miR-3675-3p | 894 | 1915 |
| hsa-miR-3675-5p | 895 | 1916 |
| hsa-miR-367-5p | 896 | 1917 |
| hsa-miR-3676-3p | 897 | 1918 |
| hsa-miR-3676-5p | 898 | 1919 |
| hsa-miR-3677-3p | 899 | 1920 |
| hsa-miR-3677-5p | 900 | 1921 |
| hsa-miR-3678-3p | 901 | 1922 |
| hsa-miR-3678-5p | 902 | 1923 |
| hsa-miR-3679-3p | 903 | 1924 |
| hsa-miR-3679-5p | 904 | 1925 |
| hsa-miR-3680-3p | 905 | 1926 |
| hsa-miR-3680-5p | 906 | 1927 |
| hsa-miR-3681-3p | 907 | 1928 |
| hsa-miR-3681-5p | 908 | 1929 |
| hsa-miR-3682-3p | 909 | 1930 |
| hsa-miR-3682-5p | 910 | 1931 |
| hsa-miR-3683 | 911 | 1932 |
| hsa-miR-3684 | 912 | 1933 |
| hsa-miR-3685 | 913 | 1934 |
| hsa-miR-3686 | 914 | 1935 |
| hsa-miR-3687 | 915 | 1936 |
| hsa-miR-3688-3p | 916 | 1937 |
| hsa-miR-3688-5p | 917 | 1938 |
| hsa-miR-3689a-3p | 918 | 1939 |
| hsa-miR-3689a-5p | 919 | 1940 |
| hsa-miR-3689b-3p | 920 | 1941 |
| hsa-miR-3689b-5p | 921 | 1942 |
| hsa-miR-3689c | 922 | 1943 |
| hsa-miR-3689d | 923 | 1944 |
| hsa-miR-3689e | 924 | 1945 |
| hsa-miR-3689f | 925 | 1946 |
| hsa-miR-3690 | 926 | 1947 |
| hsa-miR-3691-3p | 927 | 1948 |
| hsa-miR-3691-5p | 928 | 1949 |
| hsa-miR-3692-3p | 929 | 1950 |
| hsa-miR-3692-5p | 930 | 1951 |
| hsa-miR-369-3p | 931 | 1952 |
| hsa-miR-369-5p | 932 | 1953 |
| hsa-miR-370 | 933 | 1954 |
| hsa-miR-3713 | 934 | 1955 |
| hsa-miR-3714 | 935 | 1956 |
| hsa-miR-371a-3p | 936 | 1957 |
| hsa-miR-371a-5p | 937 | 1958 |
| hsa-miR-371b-3p | 938 | 1959 |
| hsa-miR-371b-5p | 939 | 1960 |
| hsa-miR-372 | 940 | 1961 |
| hsa-miR-373-3p | 941 | 1962 |
| hsa-miR-373-5p | 942 | 1963 |
| hsa-miR-374a-3p | 943 | 1964 |
| hsa-miR-374a-5p | 944 | 1965 |
| hsa-miR-374b-3p | 945 | 1966 |
| hsa-miR-374b-5p | 946 | 1967 |
| hsa-miR-374c-3p | 947 | 1968 |
| hsa-miR-374c-5p | 948 | 1969 |
| hsa-miR-375 | 949 | 1970 |
| hsa-miR-376a-2-5p | 950 | 1971 |
| hsa-miR-376a-3p | 951 | 1972 |
| hsa-miR-376a-5p | 952 | 1973 |
| hsa-miR-376b-3p | 953 | 1974 |
| hsa-miR-376b-5p | 954 | 1975 |
| hsa-miR-376c-3p | 955 | 1976 |
| hsa-miR-376c-5p | 956 | 1977 |
| hsa-miR-377-3p | 957 | 1978 |
| hsa-miR-377-5p | 958 | 1979 |
| hsa-miR-378a-3p | 959 | 1980 |
| hsa-miR-378a-5p | 960 | 1981 |
| hsa-miR-378b | 961 | 1982 |
| hsa-miR-378c | 962 | 1983 |
| hsa-miR-378d | 963 | 1984 |
| hsa-miR-378e | 964 | 1985 |
| hsa-miR-378f | 965 | 1986 |
| hsa-miR-378g | 966 | 1987 |
| hsa-miR-378h | 967 | 1988 |
| hsa-miR-378i | 968 | 1989 |
| hsa-miR-378j | 969 | 1990 |
| hsa-miR-379-3p | 970 | 1991 |
| hsa-miR-379-5p | 971 | 1992 |
| hsa-miR-380-3p | 972 | 1993 |
| hsa-miR-380-5p | 973 | 1994 |
| hsa-miR-381-3p | 974 | 1995 |
| hsa-miR-381-5p | 975 | 1996 |
| hsa-miR-382-3p | 976 | 1997 |
| hsa-miR-382-5p | 977 | 1998 |
| hsa-miR-383 | 978 | 1999 |
| hsa-miR-384 | 979 | 2000 |
| hsa-miR-3907 | 980 | 2001 |
| hsa-miR-3908 | 981 | 2002 |
| hsa-miR-3909 | 982 | 2003 |
| hsa-miR-3910 | 983 | 2004 |
| hsa-miR-3911 | 984 | 2005 |
| hsa-miR-3912 | 985 | 2006 |
| hsa-miR-3913-3p | 986 | 2007 |
| hsa-miR-3913-5p | 987 | 2008 |
| hsa-miR-3914 | 988 | 2009 |
| hsa-miR-3915 | 989 | 2010 |
| hsa-miR-3916 | 990 | 2011 |
| hsa-miR-3917 | 991 | 2012 |
| hsa-miR-3918 | 992 | 2013 |
| hsa-miR-3919 | 993 | 2014 |
| hsa-miR-3920 | 994 | 2015 |
| hsa-miR-3921 | 995 | 2016 |
| hsa-miR-3922-3p | 996 | 2017 |
| hsa-miR-3922-5p | 997 | 2018 |
| hsa-miR-3923 | 998 | 2019 |
| hsa-miR-3924 | 999 | 2020 |
| hsa-miR-3925-3p | 1000 | 2021 |
| hsa-miR-3925-5p | 1001 | 2022 |
| hsa-miR-3926 | 1002 | 2023 |
| hsa-miR-3927-3p | 1003 | 2024 |
| hsa-miR-3927-5p | 1004 | 2025 |
| hsa-miR-3928 | 1005 | 2026 |
| hsa-miR-3929 | 1006 | 2027 |
| hsa-miR-3934-3p | 1007 | 2028 |
| hsa-miR-3934-5p | 1008 | 2029 |
| hsa-miR-3935 | 1009 | 2030 |
| hsa-miR-3936 | 1010 | 2031 |
| hsa-miR-3937 | 1011 | 2032 |
| hsa-miR-3938 | 1012 | 2033 |
| hsa-miR-3939 | 1013 | 2034 |
| hsa-miR-3940-3p | 1014 | 2035 |
| hsa-miR-3940-5p | 1015 | 2036 |
| hsa-miR-3941 | 1016 | 2037 |
| hsa-miR-3942-3p | 1017 | 2038 |
| hsa-miR-3942-5p | 1018 | 2039 |
| hsa-miR-3943 | 1019 | 2040 |
| hsa-miR-3944-3p | 1020 | 2041 |
| hsa-miR-3944-5p | 1021 | 2042 |
| hsa-miR-3945 | 1022 | 2043 |
| hsa-miR-3960 | 1023 | 2044 |
| hsa-miR-3972 | 1024 | 2045 |
| hsa-miR-3973 | 1025 | 2046 |
| hsa-miR-3974 | 1026 | 2047 |
| hsa-miR-3975 | 1027 | 2048 |
| hsa-miR-3976 | 1028 | 2049 |
| hsa-miR-3977 | 1029 | 2050 |
| hsa-miR-3978 | 1030 | 2051 |
| hsa-miR-409-3p | 1031 | 2052 |
| hsa-miR-409-5p | 1032 | 2053 |
| hsa-miR-410 | 1033 | 2054 |
| hsa-miR-411-3p | 1034 | 2055 |
| hsa-miR-411-5p | 1035 | 2056 |
| hsa-miR-412 | 1036 | 2057 |
| hsa-miR-421 | 1037 | 2058 |
| hsa-miR-422a | 1038 | 2059 |
| hsa-miR-423-3p | 1039 | 2060 |
| hsa-miR-423-5p | 1040 | 2061 |
| hsa-miR-424-3p | 1041 | 2062 |
| hsa-miR-424-5p | 1042 | 2063 |
| hsa-miR-4251 | 1043 | 2064 |
| hsa-miR-4252 | 1044 | 2065 |
| hsa-miR-4253 | 1045 | 2066 |
| hsa-miR-425-3p | 1046 | 2067 |
| hsa-miR-4254 | 1047 | 2068 |
| hsa-miR-4255 | 1048 | 2069 |
| hsa-miR-425-5p | 1049 | 2070 |
| hsa-miR-4256 | 1050 | 2071 |
| hsa-miR-4257 | 1051 | 2072 |
| hsa-miR-4258 | 1052 | 2073 |
| hsa-miR-4259 | 1053 | 2074 |
| hsa-miR-4260 | 1054 | 2075 |
| hsa-miR-4261 | 1055 | 2076 |
| hsa-miR-4262 | 1056 | 2077 |
| hsa-miR-4263 | 1057 | 2078 |
| hsa-miR-4264 | 1058 | 2079 |
| hsa-miR-4265 | 1059 | 2080 |
| hsa-miR-4266 | 1060 | 2081 |
| hsa-miR-4267 | 1061 | 2082 |
| hsa-miR-4268 | 1062 | 2083 |
| hsa-miR-4269 | 1063 | 2084 |
| hsa-miR-4270 | 1064 | 2085 |
| hsa-miR-4271 | 1065 | 2086 |
| hsa-miR-4272 | 1066 | 2087 |
| hsa-miR-4273 | 1067 | 2088 |
| hsa-miR-4274 | 1068 | 2089 |
| hsa-miR-4275 | 1069 | 2090 |
| hsa-miR-4276 | 1070 | 2091 |
| hsa-miR-4277 | 1071 | 2092 |
| hsa-miR-4278 | 1072 | 2093 |
| hsa-miR-4279 | 1073 | 2094 |
| hsa-miR-4280 | 1074 | 2095 |
| hsa-miR-4281 | 1075 | 2096 |
| hsa-miR-4282 | 1076 | 2097 |
| hsa-miR-4283 | 1077 | 2098 |
| hsa-miR-4284 | 1078 | 2099 |
| hsa-miR-4285 | 1079 | 2100 |
| hsa-miR-4286 | 1080 | 2101 |
| hsa-miR-4287 | 1081 | 2102 |
| hsa-miR-4288 | 1082 | 2103 |
| hsa-miR-4289 | 1083 | 2104 |
| hsa-miR-429 | 1084 | 2105 |
| hsa-miR-4290 | 1085 | 2106 |
| hsa-miR-4291 | 1086 | 2107 |
| hsa-miR-4292 | 1087 | 2108 |
| hsa-miR-4293 | 1088 | 2109 |
| hsa-miR-4294 | 1089 | 2110 |
| hsa-miR-4295 | 1090 | 2111 |
| hsa-miR-4296 | 1091 | 2112 |
| hsa-miR-4297 | 1092 | 2113 |
| hsa-miR-4298 | 1093 | 2114 |
| hsa-miR-4299 | 1094 | 2115 |
| hsa-miR-4300 | 1095 | 2116 |
| hsa-miR-4301 | 1096 | 2117 |
| hsa-miR-4302 | 1097 | 2118 |
| hsa-miR-4303 | 1098 | 2119 |
| hsa-miR-4304 | 1099 | 2120 |
| hsa-miR-4305 | 1100 | 2121 |
| hsa-miR-4306 | 1101 | 2122 |
| hsa-miR-4307 | 1102 | 2123 |
| hsa-miR-4308 | 1103 | 2124 |
| hsa-miR-4309 | 1104 | 2125 |
| hsa-miR-4310 | 1105 | 2126 |
| hsa-miR-4311 | 1106 | 2127 |
| hsa-miR-4312 | 1107 | 2128 |
| hsa-miR-4313 | 1108 | 2129 |
| hsa-miR-431-3p | 1109 | 2130 |
| hsa-miR-4314 | 1110 | 2131 |
| hsa-miR-4315 | 1111 | 2132 |
| hsa-miR-431-5p | 1112 | 2133 |
| hsa-miR-4316 | 1113 | 2134 |
| hsa-miR-4317 | 1114 | 2135 |
| hsa-miR-4318 | 1115 | 2136 |
| hsa-miR-4319 | 1116 | 2137 |
| hsa-miR-4320 | 1117 | 2138 |
| hsa-miR-4321 | 1118 | 2139 |
| hsa-miR-4322 | 1119 | 2140 |
| hsa-miR-4323 | 1120 | 2141 |
| hsa-miR-432-3p | 1121 | 2142 |
| hsa-miR-4324 | 1122 | 2143 |
| hsa-miR-4325 | 1123 | 2144 |
| hsa-miR-432-5p | 1124 | 2145 |
| hsa-miR-4326 | 1125 | 2146 |
| hsa-miR-4327 | 1126 | 2147 |
| hsa-miR-4328 | 1127 | 2148 |
| hsa-miR-4329 | 1128 | 2149 |
| hsa-miR-433 | 1129 | 2150 |
| hsa-miR-4330 | 1130 | 2151 |
| hsa-miR-4417 | 1131 | 2152 |
| hsa-miR-4418 | 1132 | 2153 |
| hsa-miR-4419a | 1133 | 2154 |
| hsa-miR-4419b | 1134 | 2155 |
| hsa-miR-4420 | 1135 | 2156 |
| hsa-miR-4421 | 1136 | 2157 |
| hsa-miR-4422 | 1137 | 2158 |
| hsa-miR-4423-3p | 1138 | 2159 |
| hsa-miR-4423-5p | 1139 | 2160 |
| hsa-miR-4424 | 1140 | 2161 |
| hsa-miR-4425 | 1141 | 2162 |
| hsa-miR-4426 | 1142 | 2163 |
| hsa-miR-4427 | 1143 | 2164 |
| hsa-miR-4428 | 1144 | 2165 |
| hsa-miR-4429 | 1145 | 2166 |
| hsa-miR-4430 | 1146 | 2167 |
| hsa-miR-4431 | 1147 | 2168 |
| hsa-miR-4432 | 1148 | 2169 |
| hsa-miR-4433-3p | 1149 | 2170 |
| hsa-miR-4433-5p | 1150 | 2171 |
| hsa-miR-4434 | 1151 | 2172 |
| hsa-miR-4435 | 1152 | 2173 |
| hsa-miR-4436a | 1153 | 2174 |
| hsa-miR-4436b-3p | 1154 | 2175 |
| hsa-miR-4436b-5p | 1155 | 2176 |
| hsa-miR-4437 | 1156 | 2177 |
| hsa-miR-4438 | 1157 | 2178 |
| hsa-miR-4439 | 1158 | 2179 |
| hsa-miR-4440 | 1159 | 2180 |
| hsa-miR-4441 | 1160 | 2181 |
| hsa-miR-4442 | 1161 | 2182 |
| hsa-miR-4443 | 1162 | 2183 |
| hsa-miR-4444 | 1163 | 2184 |
| hsa-miR-4445-3p | 1164 | 2185 |
| hsa-miR-4445-5p | 1165 | 2186 |
| hsa-miR-4446-3p | 1166 | 2187 |
| hsa-miR-4446-5p | 1167 | 2188 |
| hsa-miR-4447 | 1168 | 2189 |
| hsa-miR-4448 | 1169 | 2190 |
| hsa-miR-4449 | 1170 | 2191 |
| hsa-miR-4450 | 1171 | 2192 |
| hsa-miR-4451 | 1172 | 2193 |
| hsa-miR-4452 | 1173 | 2194 |
| hsa-miR-4453 | 1174 | 2195 |
| hsa-miR-4454 | 1175 | 2196 |
| hsa-miR-4455 | 1176 | 2197 |
| hsa-miR-4456 | 1177 | 2198 |
| hsa-miR-4457 | 1178 | 2199 |
| hsa-miR-4458 | 1179 | 2200 |
| hsa-miR-4459 | 1180 | 2201 |
| hsa-miR-4460 | 1181 | 2202 |
| hsa-miR-4461 | 1182 | 2203 |
| hsa-miR-4462 | 1183 | 2204 |
| hsa-miR-4463 | 1184 | 2205 |
| hsa-miR-4464 | 1185 | 2206 |
| hsa-miR-4465 | 1186 | 2207 |
| hsa-miR-4466 | 1187 | 2208 |
| hsa-miR-4467 | 1188 | 2209 |
| hsa-miR-4468 | 1189 | 2210 |
| hsa-miR-4469 | 1190 | 2211 |
| hsa-miR-4470 | 1191 | 2212 |
| hsa-miR-4471 | 2213 | 3234 |
| hsa-miR-4472 | 2214 | 3235 |
| hsa-miR-4473 | 2215 | 3236 |
| hsa-miR-4474-3p | 2216 | 3237 |
| hsa-miR-4474-5p | 2217 | 3238 |
| hsa-miR-4475 | 2218 | 3239 |
| hsa-miR-4476 | 2219 | 3240 |
| hsa-miR-4477a | 2220 | 3241 |
| hsa-miR-4477b | 2221 | 3242 |
| hsa-miR-4478 | 2222 | 3243 |
| hsa-miR-4479 | 2223 | 3244 |
| hsa-miR-448 | 2224 | 3245 |
| hsa-miR-4480 | 2225 | 3246 |
| hsa-miR-4481 | 2226 | 3247 |
| hsa-miR-4482-3p | 2227 | 3248 |
| hsa-miR-4482-5p | 2228 | 3249 |
| hsa-miR-4483 | 2229 | 3250 |
| hsa-miR-4484 | 2230 | 3251 |
| hsa-miR-4485 | 2231 | 3252 |
| hsa-miR-4486 | 2232 | 3253 |
| hsa-miR-4487 | 2233 | 3254 |
| hsa-miR-4488 | 2234 | 3255 |
| hsa-miR-4489 | 2235 | 3256 |
| hsa-miR-4490 | 2236 | 3257 |
| hsa-miR-4491 | 2237 | 3258 |
| hsa-miR-4492 | 2238 | 3259 |
| hsa-miR-4493 | 2239 | 3260 |
| hsa-miR-4494 | 2240 | 3261 |
| hsa-miR-4495 | 2241 | 3262 |
| hsa-miR-4496 | 2242 | 3263 |
| hsa-miR-4497 | 2243 | 3264 |
| hsa-miR-4498 | 2244 | 3265 |
| hsa-miR-4499 | 2245 | 3266 |
| hsa-miR-449a | 2246 | 3267 |
| hsa-miR-449b-3p | 2247 | 3268 |
| hsa-miR-449b-5p | 2248 | 3269 |
| hsa-miR-449c-3p | 2249 | 3270 |
| hsa-miR-449c-5p | 2250 | 3271 |
| hsa-miR-4500 | 2251 | 3272 |
| hsa-miR-4501 | 2252 | 3273 |
| hsa-miR-4502 | 2253 | 3274 |
| hsa-miR-4503 | 2254 | 3275 |
| hsa-miR-4504 | 2255 | 3276 |
| hsa-miR-4505 | 2256 | 3277 |
| hsa-miR-4506 | 2257 | 3278 |
| hsa-miR-4507 | 2258 | 3279 |
| hsa-miR-4508 | 2259 | 3280 |
| hsa-miR-4509 | 2260 | 3281 |
| hsa-miR-450a-3p | 2261 | 3282 |
| hsa-miR-450a-5p | 2262 | 3283 |
| hsa-miR-450b-3p | 2263 | 3284 |
| hsa-miR-450b-5p | 2264 | 3285 |
| hsa-miR-4510 | 2265 | 3286 |
| hsa-miR-4511 | 2266 | 3287 |
| hsa-miR-4512 | 2267 | 3288 |
| hsa-miR-4513 | 2268 | 3289 |
| hsa-miR-4514 | 2269 | 3290 |
| hsa-miR-4515 | 2270 | 3291 |
| hsa-miR-4516 | 2271 | 3292 |
| hsa-miR-4517 | 2272 | 3293 |
| hsa-miR-4518 | 2273 | 3294 |
| hsa-miR-4519 | 2274 | 3295 |
| hsa-miR-451a | 2275 | 3296 |
| hsa-miR-451b | 2276 | 3297 |
| hsa-miR-4520a-3p | 2277 | 3298 |
| hsa-miR-4520a-5p | 2278 | 3299 |
| hsa-miR-4520b-3p | 2279 | 3300 |
| hsa-miR-4520b-5p | 2280 | 3301 |
| hsa-miR-4521 | 2281 | 3302 |
| hsa-miR-4522 | 2282 | 3303 |
| hsa-miR-4523 | 2283 | 3304 |
| hsa-miR-452-3p | 2284 | 3305 |
| hsa-miR-4524a-3p | 2285 | 3306 |
| hsa-miR-4524a-5p | 2286 | 3307 |
| hsa-miR-4524b-3p | 2287 | 3308 |
| hsa-miR-4524b-5p | 2288 | 3309 |
| hsa-miR-4525 | 2289 | 3310 |
| hsa-miR-452-5p | 2290 | 3311 |
| hsa-miR-4526 | 2291 | 3312 |
| hsa-miR-4527 | 2292 | 3313 |
| hsa-miR-4528 | 2293 | 3314 |
| hsa-miR-4529-3p | 2294 | 3315 |
| hsa-miR-4529-5p | 2295 | 3316 |
| hsa-miR-4530 | 2296 | 3317 |
| hsa-miR-4531 | 2297 | 3318 |
| hsa-miR-4532 | 2298 | 3319 |
| hsa-miR-4533 | 2299 | 3320 |
| hsa-miR-4534 | 2300 | 3321 |
| hsa-miR-4535 | 2301 | 3322 |
| hsa-miR-4536-3p | 2302 | 3323 |
| hsa-miR-4536-5p | 2303 | 3324 |
| hsa-miR-4537 | 2304 | 3325 |
| hsa-miR-4538 | 2305 | 3326 |
| hsa-miR-4539 | 2306 | 3327 |
| hsa-miR-4540 | 2307 | 3328 |
| hsa-miR-454-3p | 2308 | 3329 |
| hsa-miR-454-5p | 2309 | 3330 |
| hsa-miR-455-3p | 2310 | 3331 |
| hsa-miR-455-5p | 2311 | 3332 |
| hsa-miR-4632-3p | 2312 | 3333 |
| hsa-miR-4632-5p | 2313 | 3334 |
| hsa-miR-4633-3p | 2314 | 3335 |
| hsa-miR-4633-5p | 2315 | 3336 |
| hsa-miR-4634 | 2316 | 3337 |
| hsa-miR-4635 | 2317 | 3338 |
| hsa-miR-4636 | 2318 | 3339 |
| hsa-miR-4637 | 2319 | 3340 |
| hsa-miR-4638-3p | 2320 | 3341 |
| hsa-miR-4638-5p | 2321 | 3342 |
| hsa-miR-4639-3p | 2322 | 3343 |
| hsa-miR-4639-5p | 2323 | 3344 |
| hsa-miR-4640-3p | 2324 | 3345 |
| hsa-miR-4640-5p | 2325 | 3346 |
| hsa-miR-4641 | 2326 | 3347 |
| hsa-miR-4642 | 2327 | 3348 |
| hsa-miR-4643 | 2328 | 3349 |
| hsa-miR-4644 | 2329 | 3350 |
| hsa-miR-4645-3p | 2330 | 3351 |
| hsa-miR-4645-5p | 2331 | 3352 |
| hsa-miR-4646-3p | 2332 | 3353 |
| hsa-miR-4646-5p | 2333 | 3354 |
| hsa-miR-4647 | 2334 | 3355 |
| hsa-miR-4648 | 2335 | 3356 |
| hsa-miR-4649-3p | 2336 | 3357 |
| hsa-miR-4649-5p | 2337 | 3358 |
| hsa-miR-4650-3p | 2338 | 3359 |
| hsa-miR-4650-5p | 2339 | 3360 |
| hsa-miR-4651 | 2340 | 3361 |
| hsa-miR-4652-3p | 2341 | 3362 |
| hsa-miR-4652-5p | 2342 | 3363 |
| hsa-miR-4653-3p | 2343 | 3364 |
| hsa-miR-4653-5p | 2344 | 3365 |
| hsa-miR-4654 | 2345 | 3366 |
| hsa-miR-4655-3p | 2346 | 3367 |
| hsa-miR-4655-5p | 2347 | 3368 |
| hsa-miR-4656 | 2348 | 3369 |
| hsa-miR-4657 | 2349 | 3370 |
| hsa-miR-4658 | 2350 | 3371 |
| hsa-miR-4659a-3p | 2351 | 3372 |
| hsa-miR-4659a-5p | 2352 | 3373 |
| hsa-miR-4659b-3p | 2353 | 3374 |
| hsa-miR-4659b-5p | 2354 | 3375 |
| hsa-miR-466 | 2355 | 3376 |
| hsa-miR-4660 | 2356 | 3377 |
| hsa-miR-4661-3p | 2357 | 3378 |
| hsa-miR-4661-5p | 2358 | 3379 |
| hsa-miR-4662a-3p | 2359 | 3380 |
| hsa-miR-4662a-5p | 2360 | 3381 |
| hsa-miR-4662b | 2361 | 3382 |
| hsa-miR-4663 | 2362 | 3383 |
| hsa-miR-4664-3p | 2363 | 3384 |
| hsa-miR-4664-5p | 2364 | 3385 |
| hsa-miR-4665-3p | 2365 | 3386 |
| hsa-miR-4665-5p | 2366 | 3387 |
| hsa-miR-4666a-3p | 2367 | 3388 |
| hsa-miR-4666a-5p | 2368 | 3389 |
| hsa-miR-4666b | 2369 | 3390 |
| hsa-miR-4667-3p | 2370 | 3391 |
| hsa-miR-4667-5p | 2371 | 3392 |
| hsa-miR-4668-3p | 2372 | 3393 |
| hsa-miR-4668-5p | 2373 | 3394 |
| hsa-miR-4669 | 2374 | 3395 |
| hsa-miR-4670-3p | 2375 | 3396 |
| hsa-miR-4670-5p | 2376 | 3397 |
| hsa-miR-4671-3p | 2377 | 3398 |
| hsa-miR-4671-5p | 2378 | 3399 |
| hsa-miR-4672 | 2379 | 3400 |
| hsa-miR-4673 | 2380 | 3401 |
| hsa-miR-4674 | 2381 | 3402 |
| hsa-miR-4675 | 2382 | 3403 |
| hsa-miR-4676-3p | 2383 | 3404 |
| hsa-miR-4676-5p | 2384 | 3405 |
| hsa-miR-4677-3p | 2385 | 3406 |
| hsa-miR-4677-5p | 2386 | 3407 |
| hsa-miR-4678 | 2387 | 3408 |
| hsa-miR-4679 | 2388 | 3409 |
| hsa-miR-4680-3p | 2389 | 3410 |
| hsa-miR-4680-5p | 2390 | 3411 |
| hsa-miR-4681 | 2391 | 3412 |
| hsa-miR-4682 | 2392 | 3413 |
| hsa-miR-4683 | 2393 | 3414 |
| hsa-miR-4684-3p | 2394 | 3415 |
| hsa-miR-4684-5p | 2395 | 3416 |
| hsa-miR-4685-3p | 2396 | 3417 |
| hsa-miR-4685-5p | 2397 | 3418 |
| hsa-miR-4686 | 2398 | 3419 |
| hsa-miR-4687-3p | 2399 | 3420 |
| hsa-miR-4687-5p | 2400 | 3421 |
| hsa-miR-4688 | 2401 | 3422 |
| hsa-miR-4689 | 2402 | 3423 |
| hsa-miR-4690-3p | 2403 | 3424 |
| hsa-miR-4690-5p | 2404 | 3425 |
| hsa-miR-4691-3p | 2405 | 3426 |
| hsa-miR-4691-5p | 2406 | 3427 |
| hsa-miR-4692 | 2407 | 3428 |
| hsa-miR-4693-3p | 2408 | 3429 |
| hsa-miR-4693-5p | 2409 | 3430 |
| hsa-miR-4694-3p | 2410 | 3431 |
| hsa-miR-4694-5p | 2411 | 3432 |
| hsa-miR-4695-3p | 2412 | 3433 |
| hsa-miR-4695-5p | 2413 | 3434 |
| hsa-miR-4696 | 2414 | 3435 |
| hsa-miR-4697-3p | 2415 | 3436 |
| hsa-miR-4697-5p | 2416 | 3437 |
| hsa-miR-4698 | 2417 | 3438 |
| hsa-miR-4699-3p | 2418 | 3439 |
| hsa-miR-4699-5p | 2419 | 3440 |
| hsa-miR-4700-3p | 2420 | 3441 |
| hsa-miR-4700-5p | 2421 | 3442 |
| hsa-miR-4701-3p | 2422 | 3443 |
| hsa-miR-4701-5p | 2423 | 3444 |
| hsa-miR-4703-3p | 2424 | 3445 |
| hsa-miR-4703-5p | 2425 | 3446 |
| hsa-miR-4704-3p | 2426 | 3447 |
| hsa-miR-4704-5p | 2427 | 3448 |
| hsa-miR-4705 | 2428 | 3449 |
| hsa-miR-4706 | 2429 | 3450 |
| hsa-miR-4707-3p | 2430 | 3451 |
| hsa-miR-4707-5p | 2431 | 3452 |
| hsa-miR-4708-3p | 2432 | 3453 |
| hsa-miR-4708-5p | 2433 | 3454 |
| hsa-miR-4709-3p | 2434 | 3455 |
| hsa-miR-4709-5p | 2435 | 3456 |
| hsa-miR-4710 | 2436 | 3457 |
| hsa-miR-4711-3p | 2437 | 3458 |
| hsa-miR-4711-5p | 2438 | 3459 |
| hsa-miR-4712-3p | 2439 | 3460 |
| hsa-miR-4712-5p | 2440 | 3461 |
| hsa-miR-4713-3p | 2441 | 3462 |
| hsa-miR-4713-5p | 2442 | 3463 |
| hsa-miR-4714-3p | 2443 | 3464 |
| hsa-miR-4714-5p | 2444 | 3465 |
| hsa-miR-4715-3p | 2445 | 3466 |
| hsa-miR-4715-5p | 2446 | 3467 |
| hsa-miR-4716-3p | 2447 | 3468 |
| hsa-miR-4716-5p | 2448 | 3469 |
| hsa-miR-4717-3p | 2449 | 3470 |
| hsa-miR-4717-5p | 2450 | 3471 |
| hsa-miR-4718 | 2451 | 3472 |
| hsa-miR-4719 | 2452 | 3473 |
| hsa-miR-4720-3p | 2453 | 3474 |
| hsa-miR-4720-5p | 2454 | 3475 |
| hsa-miR-4721 | 2455 | 3476 |
| hsa-miR-4722-3p | 2456 | 3477 |
| hsa-miR-4722-5p | 2457 | 3478 |
| hsa-miR-4723-3p | 2458 | 3479 |
| hsa-miR-4723-5p | 2459 | 3480 |
| hsa-miR-4724-3p | 2460 | 3481 |
| hsa-miR-4724-5p | 2461 | 3482 |
| hsa-miR-4725-3p | 2462 | 3483 |
| hsa-miR-4725-5p | 2463 | 3484 |
| hsa-miR-4726-3p | 2464 | 3485 |
| hsa-miR-4726-5p | 2465 | 3486 |
| hsa-miR-4727-3p | 2466 | 3487 |
| hsa-miR-4727-5p | 2467 | 3488 |
| hsa-miR-4728-3p | 2468 | 3489 |
| hsa-miR-4728-5p | 2469 | 3490 |
| hsa-miR-4729 | 2470 | 3491 |
| hsa-miR-4730 | 2471 | 3492 |
| hsa-miR-4731-3p | 2472 | 3493 |
| hsa-miR-4731-5p | 2473 | 3494 |
| hsa-miR-4732-3p | 2474 | 3495 |
| hsa-miR-4732-5p | 2475 | 3496 |
| hsa-miR-4733-3p | 2476 | 3497 |
| hsa-miR-4733-5p | 2477 | 3498 |
| hsa-miR-4734 | 2478 | 3499 |
| hsa-miR-4735-3p | 2479 | 3500 |
| hsa-miR-4735-5p | 2480 | 3501 |
| hsa-miR-4736 | 2481 | 3502 |
| hsa-miR-4737 | 2482 | 3503 |
| hsa-miR-4738-3p | 2483 | 3504 |
| hsa-miR-4738-5p | 2484 | 3505 |
| hsa-miR-4739 | 2485 | 3506 |
| hsa-miR-4740-3p | 2486 | 3507 |
| hsa-miR-4740-5p | 2487 | 3508 |
| hsa-miR-4741 | 2488 | 3509 |
| hsa-miR-4742-3p | 2489 | 3510 |
| hsa-miR-4742-5p | 2490 | 3511 |
| hsa-miR-4743-3p | 2491 | 3512 |
| hsa-miR-4743-5p | 2492 | 3513 |
| hsa-miR-4744 | 2493 | 3514 |
| hsa-miR-4745-3p | 2494 | 3515 |
| hsa-miR-4745-5p | 2495 | 3516 |
| hsa-miR-4746-3p | 2496 | 3517 |
| hsa-miR-4746-5p | 2497 | 3518 |
| hsa-miR-4747-3p | 2498 | 3519 |
| hsa-miR-4747-5p | 2499 | 3520 |
| hsa-miR-4748 | 2500 | 3521 |
| hsa-miR-4749-3p | 2501 | 3522 |
| hsa-miR-4749-5p | 2502 | 3523 |
| hsa-miR-4750-3p | 2503 | 3524 |
| hsa-miR-4750-5p | 2504 | 3525 |
| hsa-miR-4751 | 2505 | 3526 |
| hsa-miR-4752 | 2506 | 3527 |
| hsa-miR-4753-3p | 2507 | 3528 |
| hsa-miR-4753-5p | 2508 | 3529 |
| hsa-miR-4754 | 2509 | 3530 |
| hsa-miR-4755-3p | 2510 | 3531 |
| hsa-miR-4755-5p | 2511 | 3532 |
| hsa-miR-4756-3p | 2512 | 3533 |
| hsa-miR-4756-5p | 2513 | 3534 |
| hsa-miR-4757-3p | 2514 | 3535 |
| hsa-miR-4757-5p | 2515 | 3536 |
| hsa-miR-4758-3p | 2516 | 3537 |
| hsa-miR-4758-5p | 2517 | 3538 |
| hsa-miR-4759 | 2518 | 3539 |
| hsa-miR-4760-3p | 2519 | 3540 |
| hsa-miR-4760-5p | 2520 | 3541 |
| hsa-miR-4761-3p | 2521 | 3542 |
| hsa-miR-4761-5p | 2522 | 3543 |
| hsa-miR-4762-3p | 2523 | 3544 |
| hsa-miR-4762-5p | 2524 | 3545 |
| hsa-miR-4763-3p | 2525 | 3546 |
| hsa-miR-4763 -5p | 2526 | 3547 |
| hsa-miR-4764-3p | 2527 | 3548 |
| hsa-miR-4764-5p | 2528 | 3549 |
| hsa-miR-4765 | 2529 | 3550 |
| hsa-miR-4766-3p | 2530 | 3551 |
| hsa-miR-4766-5p | 2531 | 3552 |
| hsa-miR-4767 | 2532 | 3553 |
| hsa-miR-4768-3p | 2533 | 3554 |
| hsa-miR-4768-5p | 2534 | 3555 |
| hsa-miR-4769-3p | 2535 | 3556 |
| hsa-miR-4769-5p | 2536 | 3557 |
| hsa-miR-4770 | 2537 | 3558 |
| hsa-miR-4771 | 2538 | 3559 |
| hsa-miR-4772-3p | 2539 | 3560 |
| hsa-miR-4772-5p | 2540 | 3561 |
| hsa-miR-4773 | 2541 | 3562 |
| hsa-miR-4774-3p | 2542 | 3563 |
| hsa-miR-4774-5p | 2543 | 3564 |
| hsa-miR-4775 | 2544 | 3565 |
| hsa-miR-4776-3p | 2545 | 3566 |
| hsa-miR-4776-5p | 2546 | 3567 |
| hsa-miR-4777-3p | 2547 | 3568 |
| hsa-miR-4777-5p | 2548 | 3569 |
| hsa-miR-4778-3p | 2549 | 3570 |
| hsa-miR-4778-5p | 2550 | 3571 |
| hsa-miR-4779 | 2551 | 3572 |
| hsa-miR-4780 | 2552 | 3573 |
| hsa-miR-4781-3p | 2553 | 3574 |
| hsa-miR-4781-5p | 2554 | 3575 |
| hsa-miR-4782-3p | 2555 | 3576 |
| hsa-miR-4782-5p | 2556 | 3577 |
| hsa-miR-4783-3p | 2557 | 3578 |
| hsa-miR-4783-5p | 2558 | 3579 |
| hsa-miR-4784 | 2559 | 3580 |
| hsa-miR-4785 | 2560 | 3581 |
| hsa-miR-4786-3p | 2561 | 3582 |
| hsa-miR-4786-5p | 2562 | 3583 |
| hsa-miR-4787-3p | 2563 | 3584 |
| hsa-miR-4787-5p | 2564 | 3585 |
| hsa-miR-4788 | 2565 | 3586 |
| hsa-miR-4789-3p | 2566 | 3587 |
| hsa-miR-4789-5p | 2567 | 3588 |
| hsa-miR-4790-3p | 2568 | 3589 |
| hsa-miR-4790-5p | 2569 | 3590 |
| hsa-miR-4791 | 2570 | 3591 |
| hsa-miR-4792 | 2571 | 3592 |
| hsa-miR-4793-3p | 2572 | 3593 |
| hsa-miR-4793-5p | 2573 | 3594 |
| hsa-miR-4794 | 2574 | 3595 |
| hsa-miR-4795-3p | 2575 | 3596 |
| hsa-miR-4795-5p | 2576 | 3597 |
| hsa-miR-4796-3p | 2577 | 3598 |
| hsa-miR-4796-5p | 2578 | 3599 |
| hsa-miR-4797-3p | 2579 | 3600 |
| hsa-miR-4797-5p | 2580 | 3601 |
| hsa-miR-4798-3p | 2581 | 3602 |
| hsa-miR-4798-5p | 2582 | 3603 |
| hsa-miR-4799-3p | 2583 | 3604 |
| hsa-miR-4799-5p | 2584 | 3605 |
| hsa-miR-4800-3p | 2585 | 3606 |
| hsa-miR-4800-5p | 2586 | 3607 |
| hsa-miR-4801 | 2587 | 3608 |
| hsa-miR-4802-3p | 2588 | 3609 |
| hsa-miR-4802-5p | 2589 | 3610 |
| hsa-miR-4803 | 2590 | 3611 |
| hsa-miR-4804-3p | 2591 | 3612 |
| hsa-miR-4804-5p | 2592 | 3613 |
| hsa-miR-483-3p | 2593 | 3614 |
| hsa-miR-483-5p | 2594 | 3615 |
| hsa-miR-484 | 2595 | 3616 |
| hsa-miR-485-3p | 2596 | 3617 |
| hsa-miR-485-5p | 2597 | 3618 |
| hsa-miR-486-3p | 2598 | 3619 |
| hsa-miR-486-5p | 2599 | 3620 |
| hsa-miR-487a | 2600 | 3621 |
| hsa-miR-487b | 2601 | 3622 |
| hsa-miR-488-3p | 2602 | 3623 |
| hsa-miR-488-5p | 2603 | 3624 |
| hsa-miR-489 | 2604 | 3625 |
| hsa-miR-490-3p | 2605 | 3626 |
| hsa-miR-490-5p | 2606 | 3627 |
| hsa-miR-491-3p | 2607 | 3628 |
| hsa-miR-491-5p | 2608 | 3629 |
| hsa-miR-492 | 2609 | 3630 |
| hsa-miR-493-3p | 2610 | 3631 |
| hsa-miR-493-5p | 2611 | 3632 |
| hsa-miR-494 | 2612 | 3633 |
| hsa-miR-495-3p | 2613 | 3634 |
| hsa-miR-495-5p | 2614 | 3635 |
| hsa-miR-496 | 2615 | 3636 |
| hsa-miR-497-3p | 2616 | 3637 |
| hsa-miR-497-5p | 2617 | 3638 |
| hsa-miR-498 | 2618 | 3639 |
| hsa-miR-4999-3p | 2619 | 3640 |
| hsa-miR-4999-5p | 2620 | 3641 |
| hsa-miR-499a-3p | 2621 | 3642 |
| hsa-miR-499a-5p | 2622 | 3643 |
| hsa-miR-499b-3p | 2623 | 3644 |
| hsa-miR-499b-5p | 2624 | 3645 |
| hsa-miR-5000-3p | 2625 | 3646 |
| hsa-miR-5000-5p | 2626 | 3647 |
| hsa-miR-5001-3p | 2627 | 3648 |
| hsa-miR-5001-5p | 2628 | 3649 |
| hsa-miR-5002-3p | 2629 | 3650 |
| hsa-miR-5002-5p | 2630 | 3651 |
| hsa-miR-5003-3p | 2631 | 3652 |
| hsa-miR-5003-5p | 2632 | 3653 |
| hsa-miR-5004-3p | 2633 | 3654 |
| hsa-miR-5004-5p | 2634 | 3655 |
| hsa-miR-5006-3p | 2635 | 3656 |
| hsa-miR-5006-5p | 2636 | 3657 |
| hsa-miR-5007-3p | 2637 | 3658 |
| hsa-miR-5007-5p | 2638 | 3659 |
| hsa-miR-5008-3p | 2639 | 3660 |
| hsa-miR-5008-5p | 2640 | 3661 |
| hsa-miR-5009-3p | 2641 | 3662 |
| hsa-miR-5009-5p | 2642 | 3663 |
| hsa-miR-500a-3p | 2643 | 3664 |
| hsa-miR-500a-5p | 2644 | 3665 |
| hsa-miR-500b | 2645 | 3666 |
| hsa-miR-5010-3p | 2646 | 3667 |
| hsa-miR-5010-5p | 2647 | 3668 |
| hsa-miR-5011-3p | 2648 | 3669 |
| hsa-miR-5011-5p | 2649 | 3670 |
| hsa-miR-501-3p | 2650 | 3671 |
| hsa-miR-501-5p | 2651 | 3672 |
| hsa-miR-502-3p | 2652 | 3673 |
| hsa-miR-502-5p | 2653 | 3674 |
| hsa-miR-503-3p | 2654 | 3675 |
| hsa-miR-503-5p | 2655 | 3676 |
| hsa-miR-504 | 2656 | 3677 |
| hsa-miR-5047 | 2657 | 3678 |
| hsa-miR-505-3p | 2658 | 3679 |
| hsa-miR-505-5p | 2659 | 3680 |
| hsa-miR-506-3p | 2660 | 3681 |
| hsa-miR-506-5p | 2661 | 3682 |
| hsa-miR-507 | 2662 | 3683 |
| hsa-miR-508-3p | 2663 | 3684 |
| hsa-miR-508-5p | 2664 | 3685 |
| hsa-miR-5087 | 2665 | 3686 |
| hsa-miR-5088 | 2666 | 3687 |
| hsa-miR-5089-3p | 2667 | 3688 |
| hsa-miR-5089-5p | 2668 | 3689 |
| hsa-miR-5090 | 2669 | 3690 |
| hsa-miR-5091 | 2670 | 3691 |
| hsa-miR-5092 | 2671 | 3692 |
| hsa-miR-5093 | 2672 | 3693 |
| hsa-miR-509-3-5p | 2673 | 3694 |
| hsa-miR-509-3p | 2674 | 3695 |
| hsa-miR-5094 | 2675 | 3696 |
| hsa-miR-5095 | 2676 | 3697 |
| hsa-miR-509-5p | 2677 | 3698 |
| hsa-miR-5096 | 2678 | 3699 |
| hsa-miR-510 | 2679 | 3700 |
| hsa-miR-5100 | 2680 | 3701 |
| hsa-miR-511 | 2681 | 3702 |
| hsa-miR-512-3p | 2682 | 3703 |
| hsa-miR-512-5p | 2683 | 3704 |
| hsa-miR-513a-3p | 2684 | 3705 |
| hsa-miR-513a-5p | 2685 | 3706 |
| hsa-miR-513b | 2686 | 3707 |
| hsa-miR-513c-3p | 2687 | 3708 |
| hsa-miR-513c-5p | 2688 | 3709 |
| hsa-miR-514a-3p | 2689 | 3710 |
| hsa-miR-514a-5p | 2690 | 3711 |
| hsa-miR-514b-3p | 2691 | 3712 |
| hsa-miR-514b-5p | 2692 | 3713 |
| hsa-miR-515-3p | 2693 | 3714 |
| hsa-miR-515-5p | 2694 | 3715 |
| hsa-miR-516a-3p | 2695 | 3716 |
| hsa-miR-516a-5p | 2696 | 3717 |
| hsa-miR-516b-3p | 2697 | 3718 |
| hsa-miR-516b-5p | 2698 | 3719 |
| hsa-miR-517-5p | 2699 | 3720 |
| hsa-miR-517a-3p | 2700 | 3721 |
| hsa-miR-517b-3p | 2701 | 3722 |
| hsa-miR-517c-3p | 2702 | 3723 |
| hsa-miR-5186 | 2703 | 3724 |
| hsa-miR-5187-3p | 2704 | 3725 |
| hsa-miR-5187-5p | 2705 | 3726 |
| hsa-miR-5188 | 2706 | 3727 |
| hsa-miR-5189 | 2707 | 3728 |
| hsa-miR-518a-3p | 2708 | 3729 |
| hsa-miR-518a-5p | 2709 | 3730 |
| hsa-miR-518b | 2710 | 3731 |
| hsa-miR-518c-3p | 2711 | 3732 |
| hsa-miR-518c-5p | 2712 | 3733 |
| hsa-miR-518d-3p | 2713 | 3734 |
| hsa-miR-518d-5p | 2714 | 3735 |
| hsa-miR-518e-3p | 2715 | 3736 |
| hsa-miR-518e-5p | 2716 | 3737 |
| hsa-miR-518f-3p | 2717 | 3738 |
| hsa-miR-518f-5p | 2718 | 3739 |
| hsa-miR-5190 | 2719 | 3740 |
| hsa-miR-5191 | 2720 | 3741 |
| hsa-miR-5192 | 2721 | 3742 |
| hsa-miR-5193 | 2722 | 3743 |
| hsa-miR-5194 | 2723 | 3744 |
| hsa-miR-5195-3p | 2724 | 3745 |
| hsa-miR-5195-5p | 2725 | 3746 |
| hsa-miR-5196-3p | 2726 | 3747 |
| hsa-miR-5196-5p | 2727 | 3748 |
| hsa-miR-5197-3p | 2728 | 3749 |
| hsa-miR-5197-5p | 2729 | 3750 |
| hsa-miR-519a-3p | 2730 | 3751 |
| hsa-miR-519a-5p | 2731 | 3752 |
| hsa-miR-519b-3p | 2732 | 3753 |
| hsa-miR-519b-5p | 2733 | 3754 |
| hsa-miR-519c-3p | 2734 | 3755 |
| hsa-miR-519c-5p | 2735 | 3756 |
| hsa-miR-519d | 2736 | 3757 |
| hsa-miR-519e-3p | 2737 | 3758 |
| hsa-miR-519e-5p | 2738 | 3759 |
| hsa-miR-520a-3p | 2739 | 3760 |
| hsa-miR-520a-5p | 2740 | 3761 |
| hsa-miR-520b | 2741 | 3762 |
| hsa-miR-520c-3p | 2742 | 3763 |
| hsa-miR-520c-5p | 2743 | 3764 |
| hsa-miR-520d-3p | 2744 | 3765 |
| hsa-miR-520d-5p | 2745 | 3766 |
| hsa-miR-520e | 2746 | 3767 |
| hsa-miR-520f | 2747 | 3768 |
| hsa-miR-520g | 2748 | 3769 |
| hsa-miR-520h | 2749 | 3770 |
| hsa-miR-521 | 2750 | 3771 |
| hsa-miR-522-3p | 2751 | 3772 |
| hsa-miR-522-5p | 2752 | 3773 |
| hsa-miR-523-3p | 2753 | 3774 |
| hsa-miR-523-5p | 2754 | 3775 |
| hsa-miR-524-3p | 2755 | 3776 |
| hsa-miR-524-5p | 2756 | 3777 |
| hsa-miR-525-3p | 2757 | 3778 |
| hsa-miR-525-5p | 2758 | 3779 |
| hsa-miR-526a | 2759 | 3780 |
| hsa-miR-526b-3p | 2760 | 3781 |
| hsa-miR-526b-5p | 2761 | 3782 |
| hsa-miR-527 | 2762 | 3783 |
| hsa-miR-532-3p | 2763 | 3784 |
| hsa-miR-532-5p | 2764 | 3785 |
| hsa-miR-539-3p | 2765 | 3786 |
| hsa-miR-539-5p | 2766 | 3787 |
| hsa-miR-541-3p | 2767 | 3788 |
| hsa-miR-541-5p | 2768 | 3789 |
| hsa-miR-542-3p | 2769 | 3790 |
| hsa-miR-542-5p | 2770 | 3791 |
| hsa-miR-543 | 2771 | 3792 |
| hsa-miR-544a | 2772 | 3793 |
| hsa-miR-544b | 2773 | 3794 |
| hsa-miR-545-3p | 2774 | 3795 |
| hsa-miR-545-5p | 2775 | 3796 |
| hsa-miR-548 | 2776 | 3797 |
| hsa-miR-548-3p | 2777 | 3798 |
| hsa-miR-548-5p | 2778 | 3799 |
| hsa-miR-548a | 2779 | 3800 |
| hsa-miR-548a-3p | 2780 | 3801 |
| hsa-miR-548a-5p | 2781 | 3802 |
| hsa-miR-548aa | 2782 | 3803 |
| hsa-miR-548ab | 2783 | 3804 |
| hsa-miR-548ac | 2784 | 3805 |
| hsa-miR-548ad | 2785 | 3806 |
| hsa-miR-548ae | 2786 | 3807 |
| hsa-miR-548ag | 2787 | 3808 |
| hsa-miR-548ah-3p | 2788 | 3809 |
| hsa-miR-548ah-5p | 2789 | 3810 |
| hsa-miR-548ai | 2790 | 3811 |
| hsa-miR-548aj-3p | 2791 | 3812 |
| hsa-miR-548aj-5p | 2792 | 3813 |
| hsa-miR-548ak | 2793 | 3814 |
| hsa-miR-548al | 2794 | 3815 |
| hsa-miR-548am-3p | 2795 | 3816 |
| hsa-miR-548am-5p | 2796 | 3817 |
| hsa-miR-548an | 2797 | 3818 |
| hsa-miR-548ao-3p | 2798 | 3819 |
| hsa-miR-548ao-5p | 2799 | 3820 |
| hsa-miR-548ap-3p | 2800 | 3821 |
| hsa-miR-548ap-5p | 2801 | 3822 |
| hsa-miR-548aq-3p | 2802 | 3823 |
| hsa-miR-548aq-5p | 2803 | 3824 |
| hsa-miR-548ar-3p | 2804 | 3825 |
| hsa-miR-548ar-5p | 2805 | 3826 |
| hsa-miR-548as-3p | 2806 | 3827 |
| hsa-miR-548as-5p | 2807 | 3828 |
| hsa-miR-548at-3p | 2808 | 3829 |
| hsa-miR-548at-5p | 2809 | 3830 |
| hsa-miR-548au-3p | 2810 | 3831 |
| hsa-miR-548au-5p | 2811 | 3832 |
| hsa-miR-548av-3p | 2812 | 3833 |
| hsa-miR-548av-5p | 2813 | 3834 |
| hsa-miR-548aw | 2814 | 3835 |
| hsa-miR-548ay-3p | 2815 | 3836 |
| hsa-miR-548ay-5p | 2816 | 3837 |
| hsa-miR-548az-3p | 2817 | 3838 |
| hsa-miR-548az-5p | 2818 | 3839 |
| hsa-miR-548b-3p | 2819 | 3840 |
| hsa-miR-548b-5p | 2820 | 3841 |
| hsa-miR-548c-3p | 2821 | 3842 |
| hsa-miR-548c-5p | 2822 | 3843 |
| hsa-miR-548d-3p | 2823 | 3844 |
| hsa-miR-548d-5p | 2824 | 3845 |
| hsa-miR-548e | 2825 | 3846 |
| hsa-miR-548f | 2826 | 3847 |
| hsa-miR-548g-3p | 2827 | 3848 |
| hsa-miR-548g-5p | 2828 | 3849 |
| hsa-miR-548h-3p | 2829 | 3850 |
| hsa-miR-548h-5p | 2830 | 3851 |
| hsa-miR-548i | 2831 | 3852 |
| hsa-miR-548j | 2832 | 3853 |
| hsa-miR-548k | 2833 | 3854 |
| hsa-miR-548l | 2834 | 3855 |
| hsa-miR-548m | 2835 | 3856 |
| hsa-miR-548n | 2836 | 3857 |
| hsa-miR-548o-3p | 2837 | 3858 |
| hsa-miR-548o-5p | 2838 | 3859 |
| hsa-miR-548p | 2839 | 3860 |
| hsa-miR-548q | 2840 | 3861 |
| hsa-miR-548s | 2841 | 3862 |
| hsa-miR-548t-3p | 2842 | 3863 |
| hsa-miR-548t-5p | 2843 | 3864 |
| hsa-miR-548u | 2844 | 3865 |
| hsa-miR-548w | 2845 | 3866 |
| hsa-miR-548y | 2846 | 3867 |
| hsa-miR-548z | 2847 | 3868 |
| hsa-miR-549a | 2848 | 3869 |
| hsa-miR-550a-3-5p | 2849 | 3870 |
| hsa-miR-550a-3p | 2850 | 3871 |
| hsa-miR-550a-5p | 2851 | 3872 |
| hsa-miR-550b-2-5p | 2852 | 3873 |
| hsa-miR-550b-3p | 2853 | 3874 |
| hsa-miR-551a | 2854 | 3875 |
| hsa-miR-551b-3p | 2855 | 3876 |
| hsa-miR-551b-5p | 2856 | 3877 |
| hsa-miR-552 | 2857 | 3878 |
| hsa-miR-553 | 2858 | 3879 |
| hsa-miR-554 | 2859 | 3880 |
| hsa-miR-555 | 2860 | 3881 |
| hsa-miR-556-3p | 2861 | 3882 |
| hsa-miR-556-5p | 2862 | 3883 |
| hsa-miR-557 | 2863 | 3884 |
| hsa-miR-5571-3p | 2864 | 3885 |
| hsa-miR-5571-5p | 2865 | 3886 |
| hsa-miR-5572 | 2866 | 3887 |
| hsa-miR-5579-3p | 2867 | 3888 |
| hsa-miR-5579-5p | 2868 | 3889 |
| hsa-miR-558 | 2869 | 3890 |
| hsa-miR-5580-3p | 2870 | 3891 |
| hsa-miR-5580-5p | 2871 | 3892 |
| hsa-miR-5581-3p | 2872 | 3893 |
| hsa-miR-5581-5p | 2873 | 3894 |
| hsa-miR-5582-3p | 2874 | 3895 |
| hsa-miR-5582-5p | 2875 | 3896 |
| hsa-miR-5583-3p | 2876 | 3897 |
| hsa-miR-5583-5p | 2877 | 3898 |
| hsa-miR-5584-3p | 2878 | 3899 |
| hsa-miR-5584-5p | 2879 | 3900 |
| hsa-miR-5585-3p | 2880 | 3901 |
| hsa-miR-5585-5p | 2881 | 3902 |
| hsa-miR-5586-3p | 2882 | 3903 |
| hsa-miR-5586-5p | 2883 | 3904 |
| hsa-miR-5587-3p | 2884 | 3905 |
| hsa-miR-5587-5p | 2885 | 3906 |
| hsa-miR-5588-3p | 2886 | 3907 |
| hsa-miR-5588-5p | 2887 | 3908 |
| hsa-miR-5589-3p | 2888 | 3909 |
| hsa-miR-5589-5p | 2889 | 3910 |
| hsa-miR-559 | 2890 | 3911 |
| hsa-miR-5590-3p | 2891 | 3912 |
| hsa-miR-5590-5p | 2892 | 3913 |
| hsa-miR-5591-3p | 2893 | 3914 |
| hsa-miR-5591-5p | 2894 | 3915 |
| hsa-miR-561-3p | 2895 | 3916 |
| hsa-miR-561-5p | 2896 | 3917 |
| hsa-miR-562 | 2897 | 3918 |
| hsa-miR-563 | 2898 | 3919 |
| hsa-miR-564 | 2899 | 3920 |
| hsa-miR-566 | 2900 | 3921 |
| hsa-miR-567 | 2901 | 3922 |
| hsa-miR-568 | 2902 | 3923 |
| hsa-miR-5680 | 2903 | 3924 |
| hsa-miR-5681a | 2904 | 3925 |
| hsa-miR-5681b | 2905 | 3926 |
| hsa-miR-5682 | 2906 | 3927 |
| hsa-miR-5683 | 2907 | 3928 |
| hsa-miR-5684 | 2908 | 3929 |
| hsa-miR-5685 | 2909 | 3930 |
| hsa-miR-5686 | 2910 | 3931 |
| hsa-miR-5687 | 2911 | 3932 |
| hsa-miR-5688 | 2912 | 3933 |
| hsa-miR-5689 | 2913 | 3934 |
| hsa-miR-569 | 2914 | 3935 |
| hsa-miR-5690 | 2915 | 3936 |
| hsa-miR-5691 | 2916 | 3937 |
| hsa-miR-5692a | 2917 | 3938 |
| hsa-miR-5692b | 2918 | 3939 |
| hsa-miR-5692c | 2919 | 3940 |
| hsa-miR-5693 | 2920 | 3941 |
| hsa-miR-5694 | 2921 | 3942 |
| hsa-miR-5695 | 2922 | 3943 |
| hsa-miR-5696 | 2923 | 3944 |
| hsa-miR-5697 | 2924 | 3945 |
| hsa-miR-5698 | 2925 | 3946 |
| hsa-miR-5699 | 2926 | 3947 |
| hsa-miR-5700 | 2927 | 3948 |
| hsa-miR-5701 | 2928 | 3949 |
| hsa-miR-5702 | 2929 | 3950 |
| hsa-miR-5703 | 2930 | 3951 |
| hsa-miR-570-3p | 2931 | 3952 |
| hsa-miR-5704 | 2932 | 3953 |
| hsa-miR-5705 | 2933 | 3954 |
| hsa-miR-570-5p | 2934 | 3955 |
| hsa-miR-5706 | 2935 | 3956 |
| hsa-miR-5707 | 2936 | 3957 |
| hsa-miR-5708 | 2937 | 3958 |
| hsa-miR-571 | 2938 | 3959 |
| hsa-miR-572 | 2939 | 3960 |
| hsa-miR-573 | 2940 | 3961 |
| hsa-miR-5739 | 2941 | 3962 |
| hsa-miR-574-3p | 2942 | 3963 |
| hsa-miR-574-5p | 2943 | 3964 |
| hsa-miR-575 | 2944 | 3965 |
| hsa-miR-576-3p | 2945 | 3966 |
| hsa-miR-576-5p | 2946 | 3967 |
| hsa-miR-577 | 2947 | 3968 |
| hsa-miR-578 | 2948 | 3969 |
| hsa-miR-5787 | 2949 | 3970 |
| hsa-miR-579 | 2950 | 3971 |
| hsa-miR-580 | 2951 | 3972 |
| hsa-miR-581 | 2952 | 3973 |
| hsa-miR-582-3p | 2953 | 3974 |
| hsa-miR-582-5p | 2954 | 3975 |
| hsa-miR-583 | 2955 | 3976 |
| hsa-miR-584-3p | 2956 | 3977 |
| hsa-miR-584-5p | 2957 | 3978 |
| hsa-miR-585 | 2958 | 3979 |
| hsa-miR-586 | 2959 | 3980 |
| hsa-miR-587 | 2960 | 3981 |
| hsa-miR-588 | 2961 | 3982 |
| hsa-miR-589-3p | 2962 | 3983 |
| hsa-miR-589-5p | 2963 | 3984 |
| hsa-miR-590-3p | 2964 | 3985 |
| hsa-miR-590-5p | 2965 | 3986 |
| hsa-miR-591 | 2966 | 3987 |
| hsa-miR-592 | 2967 | 3988 |
| hsa-miR-593-3p | 2968 | 3989 |
| hsa-miR-593-5p | 2969 | 3990 |
| hsa-miR-595 | 2970 | 3991 |
| hsa-miR-596 | 2971 | 3992 |
| hsa-miR-597 | 2972 | 3993 |
| hsa-miR-598 | 2973 | 3994 |
| hsa-miR-599 | 2974 | 3995 |
| hsa-miR-600 | 2975 | 3996 |
| hsa-miR-601 | 2976 | 3997 |
| hsa-miR-602 | 2977 | 3998 |
| hsa-miR-603 | 2978 | 3999 |
| hsa-miR-604 | 2979 | 4000 |
| hsa-miR-605 | 2980 | 4001 |
| hsa-miR-606 | 2981 | 4002 |
| hsa-miR-6068 | 2982 | 4003 |
| hsa-miR-6069 | 2983 | 4004 |
| hsa-miR-607 | 2984 | 4005 |
| hsa-miR-6070 | 2985 | 4006 |
| hsa-miR-6071 | 2986 | 4007 |
| hsa-miR-6072 | 2987 | 4008 |
| hsa-miR-6073 | 2988 | 4009 |
| hsa-miR-6074 | 2989 | 4010 |
| hsa-miR-6075 | 2990 | 4011 |
| hsa-miR-6076 | 2991 | 4012 |
| hsa-miR-6077 | 2992 | 4013 |
| hsa-miR-6078 | 2993 | 4014 |
| hsa-miR-6079 | 2994 | 4015 |
| hsa-miR-608 | 2995 | 4016 |
| hsa-miR-6080 | 2996 | 4017 |
| hsa-miR-6081 | 2997 | 4018 |
| hsa-miR-6082 | 2998 | 4019 |
| hsa-miR-6083 | 2999 | 4020 |
| hsa-miR-6084 | 3000 | 4021 |
| hsa-miR-6085 | 3001 | 4022 |
| hsa-miR-6086 | 3002 | 4023 |
| hsa-miR-6087 | 3003 | 4024 |
| hsa-miR-6088 | 3004 | 4025 |
| hsa-miR-6089 | 3005 | 4026 |
| hsa-miR-609 | 3006 | 4027 |
| hsa-miR-6090 | 3007 | 4028 |
| hsa-miR-610 | 3008 | 4029 |
| hsa-miR-611 | 3009 | 4030 |
| hsa-miR-612 | 3010 | 4031 |
| hsa-miR-6124 | 3011 | 4032 |
| hsa-miR-6125 | 3012 | 4033 |
| hsa-miR-6126 | 3013 | 4034 |
| hsa-miR-6127 | 3014 | 4035 |
| hsa-miR-6128 | 3015 | 4036 |
| hsa-miR-6129 | 3016 | 4037 |
| hsa-miR-613 | 3017 | 4038 |
| hsa-miR-6130 | 3018 | 4039 |
| hsa-miR-6131 | 3019 | 4040 |
| hsa-miR-6132 | 3020 | 4041 |
| hsa-miR-6133 | 3021 | 4042 |
| hsa-miR-6134 | 3022 | 4043 |
| hsa-miR-614 | 3023 | 4044 |
| hsa-miR-615-3p | 3024 | 4045 |
| hsa-miR-615-5p | 3025 | 4046 |
| hsa-miR-616-3p | 3026 | 4047 |
| hsa-miR-6165 | 3027 | 4048 |
| hsa-miR-616-5p | 3028 | 4049 |
| hsa-miR-617 | 3029 | 4050 |
| hsa-miR-618 | 3030 | 4051 |
| hsa-miR-619 | 3031 | 4052 |
| hsa-miR-620 | 3032 | 4053 |
| hsa-miR-621 | 3033 | 4054 |
| hsa-miR-622 | 3034 | 4055 |
| hsa-miR-623 | 3035 | 4056 |
| hsa-miR-624-3p | 3036 | 4057 |
| hsa-miR-624-5p | 3037 | 4058 |
| hsa-miR-625-3p | 3038 | 4059 |
| hsa-miR-625-5p | 3039 | 4060 |
| hsa-miR-626 | 3040 | 4061 |
| hsa-miR-627 | 3041 | 4062 |
| hsa-miR-628-3p | 3042 | 4063 |
| hsa-miR-628-5p | 3043 | 4064 |
| hsa-miR-629-3p | 3044 | 4065 |
| hsa-miR-629-5p | 3045 | 4066 |
| hsa-miR-630 | 3046 | 4067 |
| hsa-miR-631 | 3047 | 4068 |
| hsa-miR-632 | 3048 | 4069 |
| hsa-miR-633 | 3049 | 4070 |
| hsa-miR-634 | 3050 | 4071 |
| hsa-miR-635 | 3051 | 4072 |
| hsa-miR-636 | 3052 | 4073 |
| hsa-miR-637 | 3053 | 4074 |
| hsa-miR-638 | 3054 | 4075 |
| hsa-miR-639 | 3055 | 4076 |
| hsa-miR-640 | 3056 | 4077 |
| hsa-miR-641 | 3057 | 4078 |
| hsa-miR-642a-3p | 3058 | 4079 |
| hsa-miR-642a-5p | 3059 | 4080 |
| hsa-miR-642b-3p | 3060 | 4081 |
| hsa-miR-642b-5p | 3061 | 4082 |
| hsa-miR-643 | 3062 | 4083 |
| hsa-miR-644a | 3063 | 4084 |
| hsa-miR-645 | 3064 | 4085 |
| hsa-miR-646 | 3065 | 4086 |
| hsa-miR-647 | 3066 | 4087 |
| hsa-miR-648 | 3067 | 4088 |
| hsa-miR-649 | 3068 | 4089 |
| hsa-miR-6499-3p | 3069 | 4090 |
| hsa-miR-6499-5p | 3070 | 4091 |
| hsa-miR-650 | 3071 | 4092 |
| hsa-miR-6500-3p | 3072 | 4093 |
| hsa-miR-6500-5p | 3073 | 4094 |
| hsa-miR-6501-3p | 3074 | 4095 |
| hsa-miR-6501-5p | 3075 | 4096 |
| hsa-miR-6502-3p | 3076 | 4097 |
| hsa-miR-6502-5p | 3077 | 4098 |
| hsa-miR-6503-3p | 3078 | 4099 |
| hsa-miR-6503-5p | 3079 | 4100 |
| hsa-miR-6504-3p | 3080 | 4101 |
| hsa-miR-6504-5p | 3081 | 4102 |
| hsa-miR-6505-3p | 3082 | 4103 |
| hsa-miR-6505-5p | 3083 | 4104 |
| hsa-miR-6506-3p | 3084 | 4105 |
| hsa-miR-6506-5p | 3085 | 4106 |
| hsa-miR-6507-3p | 3086 | 4107 |
| hsa-miR-6507-5p | 3087 | 4108 |
| hsa-miR-6508-3p | 3088 | 4109 |
| hsa-miR-6508-5p | 3089 | 4110 |
| hsa-miR-6509-3p | 3090 | 4111 |
| hsa-miR-6509-5p | 3091 | 4112 |
| hsa-miR-651 | 3092 | 4113 |
| hsa-miR-6510-3p | 3093 | 4114 |
| hsa-miR-6510-5p | 3094 | 4115 |
| hsa-miR-6511a-3p | 3095 | 4116 |
| hsa-miR-6511a-5p | 3096 | 4117 |
| hsa-miR-6511b-3p | 3097 | 4118 |
| hsa-miR-6511b-5p | 3098 | 4119 |
| hsa-miR-6512-3p | 3099 | 4120 |
| hsa-miR-6512-5p | 3100 | 4121 |
| hsa-miR-6513-3p | 3101 | 4122 |
| hsa-miR-6513-5p | 3102 | 4123 |
| hsa-miR-6514-3p | 3103 | 4124 |
| hsa-miR-6514-5p | 3104 | 4125 |
| hsa-miR-6515-3p | 3105 | 4126 |
| hsa-miR-6515-5p | 3106 | 4127 |
| hsa-miR-652-3p | 3107 | 4128 |
| hsa-miR-652-5p | 3108 | 4129 |
| hsa-miR-653 | 3109 | 4130 |
| hsa-miR-654-3p | 3110 | 4131 |
| hsa-miR-654-5p | 3111 | 4132 |
| hsa-miR-655 | 3112 | 4133 |
| hsa-miR-656 | 3113 | 4134 |
| hsa-miR-657 | 3114 | 4135 |
| hsa-miR-658 | 3115 | 4136 |
| hsa-miR-659-3p | 3116 | 4137 |
| hsa-miR-659-5p | 3117 | 4138 |
| hsa-miR-660-3p | 3118 | 4139 |
| hsa-miR-660-5p | 3119 | 4140 |
| hsa-miR-661 | 3120 | 4141 |
| hsa-miR-662 | 3121 | 4142 |
| hsa-miR-663a | 3122 | 4143 |
| hsa-miR-663b | 3123 | 4144 |
| hsa-miR-664a-3p | 3124 | 4145 |
| hsa-miR-664a-5p | 3125 | 4146 |
| hsa-miR-664b-3p | 3126 | 4147 |
| hsa-miR-664b-5p | 3127 | 4148 |
| hsa-miR-665 | 3128 | 4149 |
| hsa-miR-668 | 3129 | 4150 |
| hsa-miR-670 | 3130 | 4151 |
| hsa-miR-671-3p | 3131 | 4152 |
| hsa-miR-6715a-3p | 3132 | 4153 |
| hsa-miR-6715b-3p | 3133 | 4154 |
| hsa-miR-6715b-5p | 3134 | 4155 |
| hsa-miR-671-5p | 3135 | 4156 |
| hsa-miR-6716-3p | 3136 | 4157 |
| hsa-miR-6716-5p | 3137 | 4158 |
| hsa-miR-6717-5p | 3138 | 4159 |
| hsa-miR-6718-5p | 3139 | 4160 |
| hsa-miR-6719-3p | 3140 | 4161 |
| hsa-miR-6720-3p | 3141 | 4162 |
| hsa-miR-6721-5p | 3142 | 4163 |
| hsa-miR-6722-3p | 3143 | 4164 |
| hsa-miR-6722-5p | 3144 | 4165 |
| hsa-miR-6723-5p | 3145 | 4166 |
| hsa-miR-6724-5p | 3146 | 4167 |
| hsa-miR-675-3p | 3147 | 4168 |
| hsa-miR-675-5p | 3148 | 4169 |
| hsa-miR-676-3p | 3149 | 4170 |
| hsa-miR-676-5p | 3150 | 4171 |
| hsa-miR-708-3p | 3151 | 4172 |
| hsa-miR-708-5p | 3152 | 4173 |
| hsa-miR-711 | 3153 | 4174 |
| hsa-miR-7-1-3p | 3154 | 4175 |
| hsa-miR-718 | 3155 | 4176 |
| hsa-miR-7-2-3p | 3156 | 4177 |
| hsa-miR-744-3p | 3157 | 4178 |
| hsa-miR-744-5p | 3158 | 4179 |
| hsa-miR-758-3p | 3159 | 4180 |
| hsa-miR-758-5p | 3160 | 4181 |
| hsa-miR-759 | 3161 | 4182 |
| hsa-miR-7-5p | 3162 | 4183 |
| hsa-miR-760 | 3163 | 4184 |
| hsa-miR-761 | 3164 | 4185 |
| hsa-miR-762 | 3165 | 4186 |
| hsa-miR-764 | 3166 | 4187 |
| hsa-miR-765 | 3167 | 4188 |
| hsa-miR-766-3p | 3168 | 4189 |
| hsa-miR-766-5p | 3169 | 4190 |
| hsa-miR-767-3p | 3170 | 4191 |
| hsa-miR-767-5p | 3171 | 4192 |
| hsa-miR-769-3p | 3172 | 4193 |
| hsa-miR-769-5p | 3173 | 4194 |
| hsa-miR-770-5p | 3174 | 4195 |
| hsa-miR-802 | 3175 | 4196 |
| hsa-miR-873-3p | 3176 | 4197 |
| hsa-miR-873-5p | 3177 | 4198 |
| hsa-miR-874 | 3178 | 4199 |
| hsa-miR-875-3p | 3179 | 4200 |
| hsa-miR-875-5p | 3180 | 4201 |
| hsa-miR-876-3p | 3181 | 4202 |
| hsa-miR-876-5p | 3182 | 4203 |
| hsa-miR-877-3p | 3183 | 4204 |
| hsa-miR-877-5p | 3184 | 4205 |
| hsa-miR-885-3p | 3185 | 4206 |
| hsa-miR-885-5p | 3186 | 4207 |
| hsa-miR-887 | 3187 | 4208 |
| hsa-miR-888-3p | 3188 | 4209 |
| hsa-miR-888-5p | 3189 | 4210 |
| hsa-miR-889 | 3190 | 4211 |
| hsa-miR-890 | 3191 | 4212 |
| hsa-miR-891a | 3192 | 4213 |
| hsa-miR-891b | 3193 | 4214 |
| hsa-miR-892a | 3194 | 4215 |
| hsa-miR-892b | 3195 | 4216 |
| hsa-miR-892c-3p | 3196 | 4217 |
| hsa-miR-892c-5p | 3197 | 4218 |
| hsa-miR-920 | 3198 | 4219 |
| hsa-miR-921 | 3199 | 4220 |
| hsa-miR-922 | 3200 | 4221 |
| hsa-miR-924 | 3201 | 4222 |
| hsa-miR-92a-1-5p | 3202 | 4223 |
| hsa-miR-92a-2-5p | 3203 | 4224 |
| hsa-miR-92a-3p | 3204 | 4225 |
| hsa-miR-92b-3p | 3205 | 4226 |
| hsa-miR-92b-5p | 3206 | 4227 |
| hsa-miR-933 | 3207 | 4228 |
| hsa-miR-93-3p | 3208 | 4229 |
| hsa-miR-934 | 3209 | 4230 |
| hsa-miR-935 | 3210 | 4231 |
| hsa-miR-93-5p | 3211 | 4232 |
| hsa-miR-936 | 3212 | 4233 |
| hsa-miR-937-3p | 3213 | 4234 |
| hsa-miR-937-5p | 3214 | 4235 |
| hsa-miR-938 | 3215 | 4236 |
| hsa-miR-939-3p | 3216 | 4237 |
| hsa-miR-939-5p | 3217 | 4238 |
| hsa-miR-9-3p | 3218 | 4239 |
| hsa-miR-940 | 3219 | 4240 |
| hsa-miR-941 | 3220 | 4241 |
| hsa-miR-942 | 3221 | 4242 |
| hsa-miR-943 | 3222 | 4243 |
| hsa-miR-944 | 3223 | 4244 |
| hsa-miR-95 | 3224 | 4245 |
| hsa-miR-9-5p | 3225 | 4246 |
| hsa-miR-96-3p | 3226 | 4247 |
| hsa-miR-96-5p | 3227 | 4248 |
| hsa-miR-98-3p | 3228 | 4249 |
| hsa-miR-98-5p | 3229 | 4250 |
| hsa-miR-99a-3p | 3230 | 4251 |
| hsa-miR-99a-5p | 3231 | 4252 |
| hsa-miR-99b-3p | 3232 | 4253 |
| hsa-miR-99b-5p | 3233 | 4254 |

[0350] As shown in Table 12, microRNAs are differentially expressed in different tissues and cells, and often associated with different types of diseases (e.g. cancer cells). The decision of removal or insertion of microRNA binding sites, or any combination, is dependent on microRNA expression patterns and their profilings in cancer cells. In Table 12, “HCC” represents hepatocellular carcinoma, “ALL” stands for acute lymphoblastsic leukemia, “RCC” stands for renal cell carcinoma, “CLL” stands for chrominc lymphocytic leukemia and “MALT” stands for mucosa-associated lymphoid tissue.

TABLE 12
mirs, tissues/cell expression and diseases

| | mir | BS | | | |
|---|---|---|---|---|---|
| | SEQ | SEQ | | Associated | Biological |
| microRNA | ID | ID | Tissues/cells | disease | function |
| hsa-let-7a-2-3p | 171 | 1192 | Embryonic stem | inflammatory, | tumor |
| | | | cells, lung, | various cancers | suppressor, |
| | | | myeloid cells | (lung, cervical, | |
| | | | | breast, pancreatic, | |
| | | | | etc) | |
| hsa-let-7a-3p | 172 | 1193 | Embryonic stem | inflammatory, | tumor |
| | | | cells, lung | various cancers | suppressor, |
| | | | | (lung, cervical, | |
| | | | | breast, pancreatic, | |
| | | | | etc) | |
| hsa-let-7a-5p | 173 | 1194 | Embryonic stem | inflammatory, | tumor |
| | | | cells, lung | various cancers | suppressor, |
| | | | | (lung, cervical, | |
| | | | | breast, pancreatic, | |
| | | | | etc) | |
| hsa-let-7b-3p | 174 | 1195 | epithelial cells, | lung cancer, | tumor |
| | | | endothelial cells | colorectal cancer, | angiogenesis |
| | | | (vascular) | cervical cancer, | |
| | | | | inflammation and | |
| | | | | immune response | |
| | | | | after infection | |
| hsa-let-7b-5p | 175 | 1196 | epithelial cells, | cervical cancer, | tumor |
| | | | endothelial cells | inflammation and | angiogenesis |
| | | | (vascular) | immune response | |
| | | | | after infection | |
| hsa-let-7c | 176 | 1197 | dendritic cells | various cacners | tumor |
| | | | | (cervical, | suppressor, |
| | | | | pancreatic, | apoptosis |
| | | | | lung, | |
| | | | | esopphageal, etc) | |
| hsa-let-7d-3p | 177 | 1198 | embryonic stem | associated with | tumor |
| | | | cells | various cancer | suppressor |
| | | | | cells | |
| hsa-let-7d-5p | 178 | 1199 | embryonic stem | associated with | tumor |
| | | | cells | various cancer | suppressor |
| | | | | cells | |
| hsa-let-7e-3p | 179 | 1200 | immune cells | various cancer | tumor |
| | | | | cells, | suppressor |
| | | | | autoimmunity, | |
| | | | | endotoxin | |
| | | | | tolerance | |
| hsa-let-7e-5p | 180 | 1201 | immune cells | various cancer | tumor |
| | | | | cells | suppressor |
| hsa-let-7f-1-3p | 181 | 1202 | immune cells | various cancer | tumor |
| | | | (T cells) | cells | suppressor |
| hsa-let-7f-2-3p | 182 | 1203 | immune cells | various cancer | tumor |
| | | | (T cells) | cells | suppressor |
| hsa-let-7f-5p | 183 | 1204 | immune cells | Various cancer | tumor |
| | | | (T cells) | cells | suppressor |
| hsa-let-7g-3p | 184 | 1205 | hematopoietic | various cancer | tumor |
| | | | cells, adipose, | cells (lung, | suppressor |
| | | | smooth muscle | breast, etc) | |
| | | | cells | | |
| hsa-let-7g-5p | 185 | 1206 | hematopoietic | various cancer | tumor |
| | | | cells, adipose, | cells (lung, | suppressor |
| | | | smooth muscle | breast, etc) | |
| | | | cells | | |
| hsa-let-7i-3p | 186 | 1207 | immune cells | chronic | tumor |
| | | | | lymphocyte | suppressor |
| | | | | leukimia | |
| hsa-let-7i-5p | 187 | 1208 | immune cells | chronic | tumor |
| | | | | lymphocyte | suppressor |
| | | | | leukimia | |
| hsa-miR-1 | 188 | 1209 | muscle, heart | | angiogenesis, |
| | | | | | cell |
| | | | | | proliferation |
| | | | | | (myogenesis) |
| hsa-miR-100-3p | 189 | 1210 | hematopoietic | gastric cancer, | tumor |
| | | | cells, endothelial | pancreatic cancer | angiogenesis |
| | | | cells | | |
| hsa-miR-100-5p | 190 | 1211 | hematopoietic | gastric cancer, | tumor |
| | | | cells, endothelial | pancreatic cancer | angiogenesis |
| | | | cells | | |
| hsa-miR-101-3p | 191 | 1212 | endothelial cells | various cancers | angiogenesis |
| | | | | (breast, non-small | |
| | | | | cell lung, colon, | |
| | | | | gastric, pancreatic, | |
| | | | | bladder, etc); | |
| | | | | lupus | |
| | | | | erythematosus | |
| hsa-miR-101-5p | 192 | 1213 | endothelial cells | various cancers | angiogenesis |
| | | | | (breast, non-small | |
| | | | | cell lung, colon, | |
| | | | | gastric, pancreatic, | |
| | | | | bladder, etc); | |
| | | | | lupus | |
| | | | | erythematosus | |
| hsa-miR-103a-2-5p | 193 | 1214 | embryonic stem | various cancers | oncogene, cell |
| | | | cells, many | (endometrial, | growth |
| | | | tissues/cells | neuroblastoma, | |
| | | | | colorectal, breast, | |
| | | | | liver, etc) | |
| hsa-miR-103a-3p | 194 | 1215 | embryonic stem | various cancers | oncogene, cell |
| | | | cells, many | (endometrial, | growth |
| | | | tissues/cells | neuroblastoma, | |
| | | | | colorectal, breast, | |
| | | | | liver, etc) | |
| hsa-miR-103b | 195 | 1216 | Many tissues/cells | various cancers | oncogene, cell |
| | | | | (endometrial, | growth |
| | | | | neuroblastoma, | |
| | | | | colorectal, breast, | |
| | | | | liver, etc) | |
| hsa-miR-105-3p | 196 | 1217 | pancreatic cells | | |
| hsa-miR-105-5p | 197 | 1218 | pancreatic cells | | |
| hsa-miR-106a-3p | 198 | 1219 | osteogenic cells | osteocarcoma, | cell |
| | | | | other cancers | differentiation |
| hsa-miR-106a-5p | 199 | 1220 | osteogenic cells | osteocarcoma, | cell |
| | | | | other cancers | differentiation |
| hsa-miR-106b-3p | 200 | 1221 | embryonic stem | various cancers | oncogene |
| | | | cells | (non-small lung | |
| | | | | cancer, | |
| | | | | gastric cancer, | |
| | | | | HCC, gliomas, | |
| | | | | etc) | |
| hsa-miR-106b-5p | 201 | 1222 | embryonic stem | various cancers | oncogene |
| | | | cells | (non-small lung | |
| | | | | cancer, | |
| | | | | gastric cancer, | |
| | | | | HCC, gliomas, | |
| | | | | etc) | |
| hsa-miR-107 | 202 | 1223 | many tissues, brain | breast cancer, | |
| | | | hepatocytes/liver | pituitary adenoma, | |
| | | | | obesity/diabetes | |
| hsa-miR-10a-3p | 203 | 1224 | hematopoeitic | acute myeoid | oncogene, cell |
| | | | cells | leukemia | growth |
| hsa-miR-10a-5p | 204 | 1225 | hematopoeitic | acute myeoid | oncogene, cell |
| | | | cells | leukemia | growth |
| hsa-miR-10b-3p | 205 | 1226 | multiple tissues | various cancers | oncogene |
| | | | and cells | (breast, ovarian, | |
| | | | | glioblastoma, | |
| | | | | pancreatc ductal | |
| | | | | adenocarcinoma, | |
| | | | | gastric, etc) | |
| hsa-miR-10b-5p | 206 | 1227 | multiple tissues | various cancers | oncogene |
| | | | and cells | (breast, ovarian, | |
| | | | | glioblastoma, | |
| | | | | pancreatc ductal | |
| | | | | adenocarcinoma, | |
| | | | | gastric, etc) | |
| hsa-miR-1178-3p | 207 | 1228 | | osteocarcoma | |
| hsa-miR-1178-5p | 208 | 1229 | | osteocarcoma | |
| hsa-miR-1179 | 209 | 1230 | | osteocarcoma | |
| hsa-miR-1180 | 210 | 1231 | discovered in | | |
| | | | sarcoma, no | | |
| | | | expression data | | |
| hsa-miR-1181 | 211 | 1232 | | downregulated in | |
| | | | | ovarian cancer | |
| | | | | cells, | |
| | | | | associated with | |
| | | | | HCV infection in | |
| | | | | hepatocytes | |
| hsa-miR-1182 | 212 | 1233 | placenta | | |
| hsa-miR-1183 | 213 | 1234 | | associated with | |
| | | | | rectal cancer | |
| hsa-miR-1184 | 214 | 1235 | Hematopoietic | downregulated in | |
| | | | cells | oral leukoplakia | |
| | | | | (OLK) | |
| hsa-miR-1185-1-3p | 215 | 1236 | placenta | | |
| hsa-miR-1185-2-3p | 216 | 1237 | placenta | | |
| hsa-miR-1185-5p | 217 | 1238 | placenta | | |
| hsa-miR-1193 | 218 | 1239 | | melanoma | |
| hsa-miR-1197 | 219 | 1240 | | neublastoma | |
| hsa-miR-1200 | 220 | 1241 | | chronic | |
| | | | | lynphocytic | |
| | | | | leukemia | |
| hsa-miR-1202 | 221 | 1242 | | chronic | |
| | | | | lynphocytic | |
| | | | | leukemia, | |
| | | | | downregulated in | |
| | | | | ovarian cancer | |
| | | | | cells | |
| hsa-miR-1203 | 222 | 1243 | | in the chromosome | |
| | | | | 8q24 region, | |
| | | | | cancer cells | |
| hsa-miR-1204 | 223 | 1244 | | in the chromosome | |
| | | | | 8q24 region, | |
| | | | | cancer cells | |
| hsa-miR-1205 | 224 | 1245 | | in the chromosome | |
| | | | | 8q24 region, | |
| | | | | cancer cells | |
| hsa-miR-1206 | 225 | 1246 | | in the chromosome | |
| | | | | 8q24 region, | |
| | | | | cancer cells | |
| hsa-miR-1207-3p | 226 | 1247 | | in the chromosome | |
| | | | | 8q24 region, | |
| | | | | cancer cells | |
| hsa-miR-1207-5p | 227 | 1248 | | in the chromosome | |
| | | | | 8q24 region, | |
| | | | | cancer cells | |
| hsa-miR-1208 | 228 | 1249 | | in the chromosome | |
| | | | | 8q24 region, | |
| | | | | cancer cells | |
| hsa-miR-122-3p | 229 | 1250 | kidney, | Renal Cell | lipid metabolism |
| | | | liver/hepatocytes | Carcinoma (RCC), | |
| | | | | cancer cells | |
| hsa-miR-1224-3p | 230 | 1251 | | Lupus nephritis | |
| hsa-miR-1224-5p | 231 | 1252 | | rectal cancer | |
| hsa-miR-1225-3p | 232 | 1253 | | adrenal | |
| | | | | pheochromocytomas; | |
| | | | | upregulated in | |
| | | | | MITF | |
| | | | | KnockDown | |
| | | | | melanocytes | |
| hsa-miR-1225-5p | 233 | 1254 | | prostate cancer | |
| hsa-miR-122-5p | 234 | 1255 | liver/hepatocytes | cancer cells | lipid metabolism |
| hsa-miR-1226-3p | 235 | 1256 | discovered in a | | |
| | | | mirtron screening | | |
| hsa-miR-1226-5p | 236 | 1257 | discovered in a | | |
| | | | mirtron screening | | |
| hsa-miR-1227-3p | 237 | 1258 | cartilage/ | | |
| | | | chondrocytes | | |
| hsa-miR-1227-5p | 238 | 1259 | cartilage/ | | |
| | | | chondrocytes | | |
| hsa-miR-1228-3p | 239 | 1260 | liver(hepatocytes) | Hepatocellular | anti-apoptosis |
| | | | | carcinoma(HCC) | |
| hsa-miR-1228-5p | 240 | 1261 | liver(hepatocytes) | Hepatocellular | anti-apoptosis |
| | | | | carcinoma(HCC) | |
| hsa-miR-1229-3p | 241 | 1262 | discovered in a | | |
| | | | mirtron screening | | |
| hsa-miR-1229-5p | 242 | 1263 | discovered in a | | |
| | | | mirtron screening | | |
| hsa-miR-1231 | 243 | 1264 | | HCC | |
| hsa-miR-1233-1-5p | 244 | 1265 | serum | | |
| hsa-miR-1233-3p | 245 | 1266 | serum | | |
| hsa-miR-1234-3p | 246 | 1267 | discovered in | | |
| | | | embryonic stem | | |
| | | | cell | | |
| hsa-miR-1234-5p | 247 | 1268 | discovered in | | |
| | | | embryonic stem | | |
| | | | cell | | |
| hsa-miR-1236-3p | 248 | 1269 | lymphatic | | target to |
| | | | endothelial cells | | VEGFR-3 |
| hsa-miR-1236-5p | 249 | 1270 | lymphatic | | target to |
| | | | endothelial cells | | VEGFR-3 |
| hsa-miR-1237-3p | 250 | 1271 | esophageal cell | | |
| | | | line KYSE-150R | | |
| hsa-miR-1237-5p | 251 | 1272 | esophageal cell | | |
| | | | line KYSE-150R | | |
| hsa-miR-1238-3p | 252 | 1273 | | colorectal cancer | |
| hsa-miR-1238-5p | 253 | 1274 | | colorectal cancer | |
| hsa-miR-1243 | 254 | 1275 | discovered in | | |
| | | | embryonic stem | | |
| | | | cells | | |
| hsa-miR-124-3p | 255 | 1276 | brain, plasma | glioma | cell |
| | | | (exosomal) | | differentiation |
| hsa-miR-1244 | 256 | 1277 | discovered in | | |
| | | | embryonic stem | | |
| | | | cells | | |
| hsa-miR-1245a | 257 | 1278 | discovered in | | |
| | | | embryonic stem | | |
| | | | cells | | |
| hsa-miR-1245b-3p | 258 | 1279 | discovered in | | |
| | | | embryonic stem | | |
| | | | cells | | |
| hsa-miR-1245b-5p | 259 | 1280 | discovered in | | |
| | | | embryonic stem | | |
| | | | cells | | |
| hsa-miR-124-5p | 260 | 1281 | brain, Plasma | upregulated in | cell |
| | | | (circulating) | heart dysfunction, | differentiation |
| | | | | glioma | |
| hsa-miR-1246 | 261 | 1282 | embryonic stem | | |
| | | | cells, epithelial | | |
| | | | cells | | |
| hsa-miR-1247-3p | 262 | 1283 | embryoid body | | |
| | | | cells | | |
| hsa-miR-1247-5p | 263 | 1284 | embryoid body | | |
| | | | cells | | |
| hsa-miR-1248 | 264 | 1285 | | | component of |
| | | | | | SnoRNAs |
| hsa-miR-1249 | 265 | 1286 | liver(hepatocytes) | | |
| hsa-miR-1250 | 266 | 1287 | oligodendrocytes | | |
| hsa-miR-1251 | 267 | 1288 | discovered in | | |
| | | | embryonic stem | | |
| | | | cells | | |
| hsa-miR-1252 | 268 | 1289 | discovered in | | |
| | | | embryonic stem | | |
| | | | cells | | |
| hsa-miR-1253 | 269 | 1290 | discovered in | | |
| | | | embryonic stem | | |
| | | | cells | | |
| hsa-miR-1254 | 270 | 1291 | embryonic stem | | |
| | | | cells | | |
| hsa-miR-1255a | 271 | 1292 | discovered in | | |
| | | | embryonic stem | | |
| | | | cells | | |
| hsa-miR-1255b-2-3p | 272 | 1293 | discovered in | | |
| | | | embryonic stem | | |
| | | | cells | | |
| hsa-miR-1255b-5p | 273 | 1294 | discovered in | | |
| | | | embryonic stem | | |
| | | | cells | | |
| hsa-miR-1256 | 274 | 1295 | discovered in | prostate cancer | |
| | | | embryonic stem | | |
| | | | cells | | |
| hsa-miR-1257 | 275 | 1296 | discovered in | liposarcoma (soft | |
| | | | embryonic stem | tissue sarcoma) | |
| | | | cells | | |
| hsa-miR-1258 | 276 | 1297 | discovered in | breast cancer and | |
| | | | embryonic stem | lung cancer | |
| | | | cells | | |
| hsa-miR-125a-3p | 277 | 1298 | brain, | various cancer | cell proliferation |
| | | | hematopoietic | (prostate, HCC, | and |
| | | | cells | etc) | differentiation |
| hsa-miR-125a-5p | 278 | 1299 | brain, | various cancer | cell proliferation |
| | | | hematopoietic | (prostate, HCC, | and |
| | | | cells | etc) | differentiation |
| hsa-miR-125b-1-3p | 279 | 1300 | hematopoietic | various cancer | oncogene, cell |
| | | | cells (monocytes), | (prostate, HCC, | differentiation |
| | | | brain(neuron) | etc) | |
| hsa-miR-125b-2-3p | 280 | 1301 | hematopoietic | various cancer | oncogene, cell |
| | | | cells (monocytes), | (prostate, HCC, | differentiation |
| | | | brain(neuron) | etc) | |
| hsa-miR-125b-5p | 281 | 1302 | hematopoietic | various cancer | oncogene, cell |
| | | | cells, brain | (cutaneous T cell | differentiation |
| | | | (neuron) | lymphoma, | |
| | | | | prostate, HCC, | |
| | | | | etc) | |
| hsa-miR-1260a | 282 | 1303 | periodontal tissue | | |
| hsa-miR-1260b | 283 | 1304 | periodontal tissue | | |
| hsa-miR-1261 | 284 | 1305 | embryonic stem | | |
| | | | cells | | |
| hsa-miR-1262 | 285 | 1306 | embryoid body | | |
| | | | cells | | |
| hsa-miR-1263 | 286 | 1307 | discovered in | | |
| | | | embryonic stem | | |
| | | | cells | | |
| hsa-miR-126-3p | 287 | 1308 | endothelial | B-lieage ALL | angiogenesis |
| | | | cells, lung | | |
| hsa-miR-1264 | 288 | 1309 | discovered in | | |
| | | | embryonic stem | | |
| | | | cells | | |
| hsa-miR-1265 | 289 | 1310 | discovered in | | |
| | | | embryonic stem | | |
| | | | cells | | |
| hsa-miR-126-5p | 290 | 1311 | endothelial | breast cancer, | angiogenesis |
| | | | cells, lung | B-lieage ALL | |
| hsa-miR-1266 | 291 | 1312 | embryonic stem | | |
| | | | cells | | |
| hsa-miR-1267 | 292 | 1313 | discovered in | | |
| | | | embryonic stem | | |
| | | | cells | | |
| hsa-miR-1268a | 293 | 1314 | embryonic stem | | |
| | | | cells | | |
| hsa-miR-1268b | 294 | 1315 | embryonic stem | | |
| | | | cells | | |
| hsa-miR-1269a | 295 | 1316 | embryoid body | | |
| | | | cells | | |
| hsa-miR-1269b | 296 | 1317 | embryoid body | | |
| | | | cells | | |
| hsa-miR-1270 | 297 | 1318 | discovered in | | |
| | | | embryonic stem | | |
| | | | cells | | |
| hsa-miR-1271-3p | 298 | 1319 | brain | Hepatocellular | Suppress GPC-3 |
| | | | | carcinoma(HCC) | in HCC |
| hsa-miR-1271-5p | 299 | 1320 | brain | Hepatocellular | Suppress GPC-3 |
| | | | | carcinoma(HCC) | in HCC |
| hsa-miR-1272 | 300 | 1321 | embryonic stem | | |
| | | | cells | | |
| hsa-miR-1273a | 301 | 1322 | discovered in | | |
| | | | embryonic stem | | |
| | | | cells | | |
| hsa-miR-1273c | 302 | 1323 | | colorectal cancer | |
| hsa-miR-1273d | 303 | 1324 | discovered in | | |
| | | | embryonic stem | | |
| | | | cells | | |
| hsa-miR-1273e | 304 | 1325 | | solid tumor cells | |
| hsa-miR-1273f | 305 | 1326 | | cervical cancer | |
| hsa-miR-1273g-3p | 306 | 1327 | | cervical cancer | |
| hsa-miR-1273g-5p | 307 | 1328 | | cervical cancer | |
| hsa-miR-127-3p | 308 | 1329 | lung, placenta | | |
| hsa-miR-1275 | 309 | 1330 | embryonic stem | gastric carcinoma | |
| | | | cells | | |
| hsa-miR-127-5p | 310 | 1331 | lung, | | |
| | | | placenta(islet) | | |
| hsa-miR-1276 | 311 | 1332 | discovered in | | |
| | | | embryonic stem | | |
| | | | cells | | |
| hsa-miR-1277-3p | 312 | 1333 | embryoid body | | |
| | | | cells | | |
| hsa-miR-1277-5p | 313 | 1334 | embryoid body | | |
| | | | cells | | |
| hsa-miR-1278 | 314 | 1335 | discovered in | | |
| | | | embryonic stem | | |
| | | | cells | | |
| hsa-miR-1279 | 315 | 1336 | monocytes | | |
| hsa-miR-128 | 316 | 1337 | glioblast, brain | B-lieage ALL | target to |
| | | | | | neurofibromin1in |
| | | | | | neuron |
| hsa-miR-1281 | 317 | 1338 | | muscle invasive | |
| | | | | bladder cancer | |
| hsa-miR-1282 | 318 | 1339 | discovered in | | |
| | | | embryonic stem | | |
| | | | cells | | |
| hsa-miR-1283 | 319 | 1340 | placenta | | |
| hsa-miR-1284 | 320 | 1341 | | lung cancer | |
| hsa-miR-1285-3p | 321 | 1342 | | various cancer | inhibit P53 |
| | | | | cells | expression |
| hsa-miR-1285-5p | 322 | 1343 | | various cancer | inhibit P53 |
| | | | | cells | expression |
| hsa-miR-1286 | 323 | 1344 | smooth muscle | esophageal cancer | |
| hsa-miR-1287 | 324 | 1345 | embryoid body | breast cancer | |
| | | | cells | | |
| hsa-miR-1288 | 325 | 1346 | discovered in | | |
| | | | embryonic stem | | |
| | | | cells | | |
| hsa-miR-1289 | 326 | 1347 | multiple cell types | | |
| hsa-miR-1290 | 327 | 1348 | embryoid body | gastric carcinoma | |
| | | | cells | | |
| hsa-miR-1291 | 328 | 1349 | hepatocytes | | component of |
| | | | | | SnoRNAs |
| hsa-miR-129-1-3p | 329 | 1350 | multiple cell types | HCC cancer cells | |
| hsa-miR-1292-3p | 330 | 1351 | | | |
| hsa-miR-129-2-3p | 331 | 1352 | multiple cell types | various cancer | |
| | | | | cells | |
| hsa-miR-1292-5p | 332 | 1353 | | | |
| hsa-miR-1293 | 333 | 1354 | discovered in | | |
| | | | embryonic stem | | |
| | | | cells | | |
| hsa-miR-1294 | 334 | 1355 | discovered in | | |
| | | | embryonic stem | | |
| | | | cells | | |
| hsa-miR-1295a | 335 | 1356 | | tumor cells | |
| | | | | (follicular | |
| | | | | lymphoma) | |
| hsa-miR-1295b-3p | 336 | 1357 | | tumor cells | |
| | | | | (follicular | |
| | | | | lymphoma) | |
| hsa-miR-1295b-5p | 337 | 1358 | | tumor cells | |
| | | | | (follicular | |
| | | | | lymphoma) | |
| hsa-miR-129-5p | 338 | 1359 | liver(hepatocytes) | HCC, thyroid | cell death in |
| | | | | cancer | cancer cell |
| hsa-miR-1296 | 339 | 1360 | | breast cancer | |
| hsa-miR-1297 | 340 | 1361 | discovered in | | |
| | | | embryonic stem | | |
| | | | cells | | |
| hsa-miR-1298 | 341 | 1362 | | | |
| hsa-miR-1299 | 342 | 1363 | discovered in | | |
| | | | embryonic stem | | |
| | | | cells | | |
| hsa-miR-1301 | 343 | 1364 | | breast cancer | |
| hsa-miR-1302 | 344 | 1365 | | | |
| hsa-miR-1303 | 345 | 1366 | hepatocyte | colorectal cancer, | |
| | | | | liver cancer | |
| hsa-miR-1304-3p | 346 | 1367 | | | dental |
| | | | | | development |
| hsa-miR-1304-5p | 347 | 1368 | | | dental |
| | | | | | development |
| hsa-miR-1305 | 348 | 1369 | discovered in | | |
| | | | embryonic stem | | |
| | | | cells | | |
| hsa-miR-1306-3p | 349 | 1370 | discovered in | | |
| | | | embryonic stem | | |
| | | | cells | | |
| hsa-miR-1306-5p | 350 | 1371 | discovered in | | |
| | | | embryonic stem | | |
| | | | cells | | |
| hsa-miR-1307-3p | 351 | 1372 | discovered in | | |
| | | | embryonic stem | | |
| | | | cells | | |
| hsa-miR-1307-5p | 352 | 1373 | discovered in | | |
| | | | embryonic stem | | |
| | | | cells | | |
| hsa-miR-130a-3p | 353 | 1374 | lung, monocytes, | various cancers | pro-angiogenic |
| | | | vascular | (basal cell | |
| | | | endothelial cells | carcinoma, | |
| | | | | HCC, ovarian, etc), | |
| | | | | drug resistance | |
| hsa-miR-130a-5p | 354 | 1375 | lung, monocytes, | various cancers | pro-angiogenic |
| | | | vascular | (basal cell | |
| | | | endothelial cells | carcinoma, | |
| | | | | HCC, ovarian, etc), | |
| | | | | drug resistance | |
| hsa-miR-130b-3p | 355 | 1376 | Lung, epidermal | various cancers | cell |
| | | | cells | (gastric, rena cell | proiferation/ |
| | | | (keratinocytes) | carcinoma) | senescence |
| hsa-miR-130b-5p | 356 | 1377 | Lung, epidermal | various cancers | cell |
| | | | cells | (gastric, rena cell | proiferation/ |
| | | | (keratinocytes) | carcinoma) | senescence |
| hsa-miR-1321 | 357 | 1378 | | neuroblastoma | |
| hsa-miR-1322 | 358 | 1379 | | neuroblastoma | |
| hsa-miR-1323 | 359 | 1380 | placenta | neuroblastoma | |
| hsa-miR-132-3p | 360 | 1381 | Brain(neuron), | | |
| | | | immune cells | | |
| hsa-miR-1324 | 361 | 1382 | | neuroblastoma | |
| hsa-miR-132-5p | 362 | 1383 | brain(neuron), | | |
| | | | immune cells | | |
| hsa-miR-133a | 363 | 1384 | muscle, heart, | heart failure, | myogenesis |
| | | | epithelial cells | esophageal cancer | |
| | | | (lung) | | |
| hsa-miR-133b | 364 | 1385 | muscle, heart, | heart failure, | myogenesis |
| | | | epithelial cells | esophageal cancer | |
| | | | (lung) | | |
| hsa-miR-134 | 365 | 1386 | lung (epithelial) | non-samll cell | |
| | | | | lung cancer, | |
| | | | | pulmonary | |
| | | | | embolism | |
| hsa-miR-1343 | 366 | 1387 | | breast cancer cells | |
| hsa-miR-135a-3p | 367 | 1388 | brain, other tissues | various cancer | tumor |
| | | | | cells (lung, breast, | suppressor |
| | | | | colorectal, HCC, | |
| | | | | etc) | |
| hsa-miR-135a-5p | 368 | 1389 | brain, other tissues | various cancer | tumor |
| | | | | cells (lung, breast, | suppressor |
| | | | | colorectal, HCC, | |
| | | | | etc) | |
| hsa-miR-135b-3p | 369 | 1390 | brain, placenta, | various cancers | |
| | | | other tissues | (gastric, mammary, | |
| | | | | neuroblastomas, | |
| | | | | pancreatic, etc) | |
| hsa-miR-135b-5p | 370 | 1391 | brain, placenta, | various cancers | |
| | | | other tissues | (gastric, mammary, | |
| | | | | neuroblastomas, | |
| | | | | pancreatic, etc) | |
| hsa-miR-136-3p | 371 | 1392 | stem cells, | glioma | tumor |
| | | | placenta | | suppressor |
| hsa-miR-136-5p | 372 | 1393 | stem cells, | glioma | tumor |
| | | | placenta | | suppressor |
| hsa-miR-137 | 373 | 1394 | brain | various cancers | inhibiting cancer |
| | | | | (glioblastoma, | cell proliferation |
| | | | | breast, gastric etc), | and migration |
| | | | | Alzheimer's | |
| | | | | disease | |
| hsa-miR-138-1-3p | 374 | 1395 | stem cells, | arious cancer cells, | cell |
| | | | epidermal cells | downregulated in | proliferation/ |
| | | | (keratinocytes) | HCC | senescence |
| hsa-miR-138-2-3p | 375 | 1396 | stem cells | arious cancer cells, | |
| | | | | downregulated in | |
| | | | | HCC | |
| hsa-miR-138-5p | 376 | 1397 | stem cells | arious cancer cells, | |
| | | | | downregulated in | |
| | | | | HCC | |
| hsa-miR-139-3p | 377 | 1398 | hematocytes, brain | various cancer | repress cancer |
| | | | | cells (colorectal, | metastasis |
| | | | | gastric, ovarian) | |
| hsa-miR-139-5p | 378 | 1399 | hematocytes, brain | various cancer | repress cancer |
| | | | | cells (colorectal, | metastasis |
| | | | | gastric, ovarian) | |
| hsa-miR-140-3p | 379 | 1400 | airway smooth | Virus infection, | |
| | | | muscle | cancers | |
| hsa-miR-140-5p | 380 | 1401 | cartilage | csncers | |
| | | | (chondrocytes) | | |
| hsa-miR-141-3p | 381 | 1402 | Many tissues/cells | various cancer | cell |
| | | | | cells (HCC, | differentiation |
| | | | | prostate, kidney, | |
| | | | | etc) | |
| hsa-miR-141-5p | 382 | 1403 | Many tissues/cells | various cancer | cell |
| | | | | cells (HCC, | differentiation |
| | | | | prostate, kidney, | |
| | | | | etc) | |
| hsa-miR-142-3p | 383 | 1404 | meyloid cells, | | immune |
| | | | hematopoiesis, | | response |
| | | | APC cells | | |
| hsa-miR-142-5p | 384 | 1405 | meyloid cells, | | immune |
| | | | hematopoiesis, | | response |
| | | | APC cells | | |
| hsa-miR-143-3p | 385 | 1406 | vascular smooth | pre-B-cell acute | |
| | | | muscle | lymphocytic | |
| | | | | leukemia, virus | |
| | | | | infection | |
| hsa-miR-143-5p | 386 | 1407 | vascular smooth | virus infection | |
| | | | muscle, T-cells | | |
| hsa-miR-144-3p | 387 | 1408 | erythroid | various cancers | cell |
| | | | | (lung, colorectal, | differentiation |
| | | | | etc) | |
| hsa-miR-144-5p | 388 | 1409 | erythroid | various cancers | cell |
| | | | | (lung, colorectal, | differentiation |
| | | | | etc) | |
| hsa-miR-145-3p | 389 | 1410 | kidney, cartilage, | T-cell lupus | tumor |
| | | | vascular smooth | | suppressor |
| | | | muscle | | |
| hsa-miR-145-5p | 390 | 1411 | kidney, cartilage, | T-cell lupus | tumor |
| | | | vascular smooth | | suppressor |
| | | | muscle | | |
| hsa-miR-1468 | 391 | 1412 | | lung cancer | |
| hsa-miR-1469 | 392 | 1413 | | tumor | |
| | | | | cell(follicular | |
| | | | | lymphoma), rectal | |
| | | | | cancer | |
| hsa-miR-146a-3p | 393 | 1414 | immune cells, | various cancers, | |
| | | | hematopoiesis | endotoxin | |
| | | | | tolerance | |
| hsa-miR-146a-5p | 394 | 1415 | immune cells, | various cancers, | |
| | | | hematopoiesis | endotoxin | |
| | | | | tolerance | |
| hsa-miR-146b-3p | 395 | 1416 | immune cells | various cancers | |
| hsa-miR-146b-5p | 396 | 1417 | Embryonic stem | various cancers | tumor invation, |
| | | | cells | (glioma) | migration |
| hsa-miR-1470 | 397 | 1418 | | | |
| hsa-miR-1471 | 398 | 1419 | | tumor | |
| | | | | cell(follicular | |
| | | | | lymphoma), rectal | |
| | | | | cancer | |
| hsa-miR-147a | 399 | 1420 | Macrophage | inflammatory | |
| | | | | response | |
| hsa-miR-147b | 400 | 1421 | Macrophage | inflammatory | |
| | | | | response | |
| hsa-miR-148a-3p | 401 | 1422 | hematopoietic | CLL, T-lineage | |
| | | | cells | ALL | |
| hsa-miR-148a-5p | 402 | 1423 | hematopoietic | CLL, T-lineage | |
| | | | cells | ALL | |
| hsa-miR-148b-3p | 403 | 1424 | neuron | | |
| hsa-miR-148b-5p | 404 | 1425 | neuron | | |
| hsa-miR-149-3p | 405 | 1426 | heart, brain | various cancers | |
| | | | | (glioma, | |
| | | | | colorectal, gastric, | |
| | | | | etc) | |
| hsa-miR-149-5p | 406 | 1427 | heart, brain | various cancers | |
| | | | | (glioma, | |
| | | | | colorectal, gastric, | |
| | | | | etc) | |
| hsa-miR-150-3p | 407 | 1428 | hematopoietic | circulating plasma | |
| | | | cells (lymphoid) | (acute myeloid | |
| | | | | leukemia) | |
| hsa-miR-150-5p | 408 | 1429 | hematopoietic | circulating plasma | |
| | | | cells (lymphoid) | (acute myeloid | |
| | | | | leukemia) | |
| hsa-miR-151a-3p | 409 | 1430 | neuron, fetal liver | | |
| hsa-miR-151a-5p | 410 | 1431 | neuron, fetal liver | | |
| hsa-miR-151b | 411 | 1432 | immune cells (B- | | |
| | | | cells) | | |
| hsa-miR-152 | 412 | 1433 | liver | | |
| hsa-miR-153 | 413 | 1434 | brain | | |
| hsa-miR-1537 | 414 | 1435 | | | |
| hsa-miR-1538 | 415 | 1436 | blood | Cancer cells | |
| hsa-miR-1539 | 416 | 1437 | esophageal cell | | |
| | | | line KYSE-150R | | |
| hsa-miR-154-3p | 417 | 1438 | embryonic stem | | |
| | | | cells | | |
| hsa-miR-154-5p | 418 | 1439 | embryonic stem | | |
| | | | cells | | |
| hsa-miR-155-3p | 419 | 1440 | T/B cells, | various cancers | |
| | | | monocytes, breast | (CLL, B cell | |
| | | | | lymphoma, breast, | |
| | | | | lung, ovarian, | |
| | | | | cervical, | |
| | | | | colorectal, | |
| | | | | prostate) | |
| hsa-miR-155-5p | 420 | 1441 | T/B cells, | various cancers | |
| | | | monocytes, breast | (CLL, B cell | |
| | | | | lymphoma, breast, | |
| | | | | lung, ovarian, | |
| | | | | cervical, | |
| | | | | colorectal, | |
| | | | | prostate) | |
| hsa-miR-1587 | 421 | 1442 | identified in | | |
| | | | B-cells | | |
| hsa-miR-15a-3p | 422 | 1443 | blood, | | cell cycle, |
| | | | lymphocyte, | | proliferation |
| | | | hematopoietic | | |
| | | | tissues (spleen) | | |
| hsa-miR-15a-5p | 423 | 1444 | blood, | | cell cycle, |
| | | | lymphocyte, | | proliferation |
| | | | hematopoietic | | |
| | | | tissues (spleen) | | |
| hsa-miR-15b-3p | 424 | 1445 | blood, | | cell cycle, |
| | | | lymphocyte, | | proliferation |
| | | | hematopoietic | | |
| | | | tissues (spleen) | | |
| hsa-miR-15b-5p | 425 | 1446 | blood, | | cell cycle, |
| | | | lymphocyte, | | proliferation |
| | | | hematopoietic | | |
| | | | tissues (spleen) | | |
| hsa-miR-16-1-3p | 426 | 1447 | embryonic stem | | |
| | | | cells, blood, | | |
| | | | hematopoietic | | |
| | | | tissues (spleen) | | |
| hsa-miR-16-2-3p | 427 | 1448 | blood, | | |
| | | | lymphocyte, | | |
| | | | hematopoietic | | |
| | | | tissues (spleen) | | |
| hsa-miR-16-5p | 428 | 1449 | Many tissues, | | |
| | | | blood | | |
| hsa-miR-17-3p | 429 | 1450 | embryonic stem | | tumor |
| | | | cells, endothelial | | angiogenesis |
| | | | cells, | | |
| hsa-miR-17-5p | 430 | 1451 | endothelial cells, | | tumor |
| | | | kidney, breast; | | angiogenesis |
| hsa-miR-181a-2-3p | 431 | 1452 | glioblast, stem | | |
| | | | cells | | |
| hsa-miR-181a-3p | 432 | 1453 | glioblast, myeloid | | |
| | | | cells, Embryonic | | |
| | | | stem cells | | |
| hsa-miR-181a-5p | 433 | 1454 | glioblast, myeloid | | |
| | | | cells, Embryonic | | |
| | | | stem cells | | |
| hsa-miR-181b-3p | 434 | 1455 | glioblast, | | cell |
| | | | Embryonic stem | | proiferation/ |
| | | | cells, epidermal | | senescence |
| | | | (keratinocytes) | | |
| hsa-miR-181b-5p | 435 | 1456 | glioblast, | | cell |
| | | | Embryonic stem | | proiferation/ |
| | | | cells, epidermal | | senescence |
| | | | (keratinocytes) | | |
| hsa-miR-181c-3p | 436 | 1457 | brain, stem | variou cance cells | cell |
| | | | cells/progenitor | (gliobasltoma, | differentiation |
| | | | | basal cell | |
| | | | | carcinoma, | |
| | | | | prostate) | |
| hsa-miR-181c-5p | 437 | 1458 | brain, stem | variou cance cells | cell |
| | | | cells/progenitor | (gliobasltoma, | differentiation |
| | | | | basal cell | |
| | | | | carcinoma, | |
| | | | | prostate) | |
| hsa-miR-181d | 438 | 1459 | glia cells | | |
| hsa-miR-182-3p | 439 | 1460 | immune cells | autoimmune | immune |
| | | | | | response |
| hsa-miR-1825 | 440 | 1461 | discovered in a | | |
| | | | MiRDeep | | |
| | | | screening | | |
| hsa-miR-182-5p | 441 | 1462 | lung, immune cells | autoimmune | immune |
| | | | | | response |
| hsa-miR-1827 | 442 | 1463 | | small cell lung | |
| | | | | cancer | |
| hsa-miR-183-3p | 443 | 1464 | brain | | |
| hsa-miR-183-5p | 444 | 1465 | brain | | |
| hsa-miR-184 | 445 | 1466 | blood, tongue, | | |
| | | | pancreas (islet) | | |
| hsa-miR-185-3p | 446 | 1467 | | | |
| hsa-miR-185-5p | 447 | 1468 | | | |
| hsa-miR-186-3p | 448 | 1469 | osteoblasts, heart | various cancer | |
| | | | | cells | |
| hsa-miR-186-5p | 449 | 1470 | osteoblasts, heart | various cancer | |
| | | | | cells | |
| hsa-miR-187-3p | 450 | 1471 | | thyroid tumor | |
| hsa-miR-187-5p | 451 | 1472 | | thyroid tumor | |
| hsa-miR-188-3p | 452 | 1473 | irway smooth | | |
| | | | muscle, central | | |
| | | | nervous system | | |
| hsa-miR-188-5p | 453 | 1474 | irway smooth | | |
| | | | muscle, central | | |
| | | | nervous system | | |
| hsa-miR-18a-3p | 454 | 1475 | endothelial cells, | | |
| | | | lung | | |
| hsa-miR-18a-5p | 455 | 1476 | endothelial cells, | | |
| | | | lung | | |
| hsa-miR-18b-3p | 456 | 1477 | lung | | |
| hsa-miR-18b-5p | 457 | 1478 | lung | | |
| hsa-miR-1908 | 458 | 1479 | | breast cancer | |
| hsa-miR-1909-3p | 459 | 1480 | | rectal cancer | |
| hsa-miR-1909-5p | 460 | 1481 | | rectal cancer | |
| hsa-miR-190a | 461 | 1482 | brain | | |
| hsa-miR-190b | 462 | 1483 | brain | | |
| hsa-miR-1910 | 463 | 1484 | embryonic stem | | |
| | | | cells | | |
| hsa-miR-1911-3p | 464 | 1485 | embryonic stem | | |
| | | | cells, neural | | |
| | | | precursor | | |
| hsa-miR-1911-5p | 465 | 1486 | embryonic stem | | |
| | | | cells, neural | | |
| | | | precursor | | |
| hsa-miR-1912 | 466 | 1487 | embryonic stem | | |
| | | | cells, neural | | |
| | | | precursor | | |
| hsa-miR-1913 | 467 | 1488 | embryonic stem | | |
| | | | cells | | |
| hsa-miR-191-3p | 468 | 1489 | | chroninc | |
| | | | | lymphocyte | |
| | | | | leukimia, | |
| | | | | B-lieage | |
| | | | | ALL | |
| hsa-miR-1914-3p | 469 | 1490 | embryonic stem | | |
| | | | cells | | |
| hsa-miR-1914-5p | 470 | 1491 | embryonic stem | | |
| | | | cells | | |
| hsa-miR-1915-3p | 471 | 1492 | embryonic stem | | |
| | | | cells | | |
| hsa-miR-1915-5p | 472 | 1493 | embryonic stem | | |
| | | | cells | | |
| hsa-miR-191-5p | 473 | 1494 | | chroninc | |
| | | | | lymphocyte | |
| | | | | leukimia, | |
| | | | | B-lieage | |
| | | | | ALL | |
| hsa-miR-192-3p | 474 | 1495 | kidney | | |
| hsa-miR-192-5p | 475 | 1496 | kidney | | |
| hsa-miR-193a-3p | 476 | 1497 | many tissues/cells | various cancer | tumor |
| | | | | cells (lung, | suppressor, |
| | | | | osteoblastoma, | proliferation |
| | | | | ALL, follicular | |
| | | | | lymphoma, etc) | |
| hsa-miR-193a-5p | 477 | 1498 | many tissues/cells | various cancer | tumor |
| | | | | cells (lung, | suppressor, |
| | | | | osteoblastoma, | proliferation |
| | | | | ALL, follicular | |
| | | | | lymphoma, etc) | |
| hsa-miR-193b-3p | 478 | 1499 | many tissues/ cells, | arious cancer cells | tumor |
| | | | semen | (prostate, breast, | suppressor |
| | | | | melanoma, | |
| | | | | myeloma, non | |
| | | | | small cell lung, | |
| | | | | etc)follicular | |
| | | | | lymphoma) | |
| hsa-miR-193b-5p | 479 | 1500 | many tissues/cells, | arious cancer cells | tumor |
| | | | semen | (prostate, breast, | suppressor |
| | | | | melanoma, | |
| | | | | myeloma, non | |
| | | | | small cell lung, | |
| | | | | etc)follicular | |
| | | | | lymphoma) | |
| hsa-miR-194-3p | 480 | 1501 | kidney, liver | various cancers | |
| hsa-miR-194-5p | 481 | 1502 | kidney, liver | various cancers | |
| hsa-miR-195-3p | 482 | 1503 | breast, pancreas | | |
| | | | (islet) | | |
| hsa-miR-195-5p | 483 | 1504 | breast, pancreas | | |
| | | | (islet) | | |
| hsa-miR-196a-3p | 484 | 1505 | pancreatic | various cancer | oncogenic, |
| | | | cells, endometrial | cells (pancreatic, | tumor |
| | | | tissues, | osteosarcoma, | suppressor |
| | | | mesenchymal | endometrial, AML | |
| | | | stem cells | etc) | |
| hsa-miR-196a-5p | 485 | 1506 | pancreatic | various cancer | oncogenic, |
| | | | cells, endometrial | cells (pancreatic, | tumor |
| | | | tissues, | osteosarcoma, | suppressor |
| | | | mesenchymal | endometrial, AML | |
| | | | stem cells | etc) | |
| hsa-miR-196b-3p | 486 | 1507 | endometrial tissues | glioblastoma | apoptosis |
| hsa-miR-196b-5p | 487 | 1508 | endometrial tissues | glioblastoma | apoptosis |
| hsa-miR-1972 | 488 | 1509 | | acute | |
| | | | | lymphoblastic | |
| | | | | leukemia | |
| hsa-miR-1973 | 489 | 1510 | | acute | |
| | | | | lymphoblastic | |
| | | | | leukemia | |
| hsa-miR-197-3p | 490 | 1511 | blood (myeloid), | various cancers | |
| | | | other tissues/cells | (thyroid tumor, | |
| | | | | leukemia, etc) | |
| hsa-miR-197-5p | 491 | 1512 | blood (myeloid), | various cancers | |
| | | | other tissues/cells | (thyroid tumor, | |
| | | | | leukemia, etc) | |
| hsa-miR-1976 | 492 | 1513 | | acute | |
| | | | | lymphoblastic | |
| | | | | leukemia | |
| hsa-miR-198 | 493 | 1514 | central nevous | | |
| | | | system(CNS) | | |
| hsa-miR-199a-3p | 494 | 1515 | liver, embryoid | | |
| | | | body cells, | | |
| | | | cardiomyocytes | | |
| hsa-miR-199a-5p | 495 | 1516 | liver, | | |
| | | | cardiomyocytes | | |
| hsa-miR-199b-3p | 496 | 1517 | liver, osteoblast | various cancers | osteogenesis |
| hsa-miR-199b-5p | 497 | 1518 | liver, osteoblast | various cancers | osteogenesis |
| hsa-miR-19a-3p | 498 | 1519 | endothelial cells | | tumor |
| | | | | | angiogenesis |
| hsa-miR-19a-5p | 499 | 1520 | endothelial cells | | tumor |
| | | | | | angiogenesis |
| hsa-miR-19b-1-5p | 500 | 1521 | endothelial cells | | tumor |
| | | | | | angiogenesis |
| hsa-miR-19b-2-5p | 501 | 1522 | endothelial cells | | tumor |
| | | | | | angiogenesis |
| hsa-miR-19b-3p | 502 | 1523 | endothelial cells | | tumor |
| | | | | | angiogenesis |
| hsa-miR-200a-3p | 503 | 1524 | epithelial cells, | various cancers | tumor |
| | | | many other tissues | (breast, cervical, | progression and |
| | | | | bladder, etc) | metastasis |
| hsa-miR-200a-5p | 504 | 1525 | epithelial cells, | various cancers | tumor |
| | | | many other tissues | (breast, cervical, | progression and |
| | | | | bladder, etc) | metastasis |
| hsa-miR-200b-3p | 505 | 1526 | epithelial cells, | | tumor |
| | | | many other tissues | | progression and |
| | | | | | metastasis |
| hsa-miR-200b-5p | 506 | 1527 | epithelial cells, | | tumor |
| | | | many other tissues | | progression and |
| | | | | | metastasis |
| hsa-miR-200c-3p | 507 | 1528 | epithelial cells, | | tumor |
| | | | many other tissues, | | progression and |
| | | | embryonic stem | | metastasis |
| | | | cells | | |
| hsa-miR-200c-5p | 508 | 1529 | epithelial cells, | | tumor |
| | | | many other tissues, | | progression and |
| | | | embryonic stem | | metastasis |
| | | | cells | | |
| hsa-miR-202-3p | 509 | 1530 | blood | lymphomagenesis, | |
| | | | | other cancers | |
| hsa-miR-202-5p | 510 | 1531 | blood | lymphomagenesis, | |
| | | | | other cancers | |
| hsa-miR-203a | 511 | 1532 | skin (epithelium) | psoriasis, | |
| | | | | autoimmune | |
| hsa-miR-203b-3p | 512 | 1533 | skin specific | psoriasis, | |
| | | | (epithelium) | autoimmune | |
| hsa-miR-203b-5p | 513 | 1534 | skin specific | psoriasis, | |
| | | | (epithelium) | autoimmune | |
| hsa-miR-204-3p | 514 | 1535 | adipose, other | various cancers | tumor metastasis |
| | | | tissues/cells, | | |
| | | | kidney | | |
| hsa-miR-204-5p | 515 | 1536 | adipose, other | various cancers | tumor metastasis |
| | | | tissues/cells, | | |
| | | | kidney | | |
| hsa-miR-2052 | 516 | 1537 | | | |
| hsa-miR-2053 | 517 | 1538 | | | |
| hsa-miR-205-3p | 518 | 1539 | blood(plasma) | various cancer | |
| | | | | cells (breast, | |
| | | | | glioma, melanoma, | |
| | | | | endometrial, etc) | |
| hsa-miR-2054 | 519 | 1540 | | | |
| hsa-miR-205-5p | 520 | 1541 | blood(plasma) | various cancer | |
| | | | | cells (breast, | |
| | | | | glioma, melanoma, | |
| | | | | endometrial, etc) | |
| hsa-miR-206 | 521 | 1542 | muscle (cardiac | | myogenesis |
| | | | and skeletal) | | |
| hsa-miR-208a | 522 | 1543 | heart(cardiomyocyte), | cardiac defects | |
| | | | muscle | | |
| hsa-miR-208b | 523 | 1544 | heart(cardiomyocyte), | cardiac defects | |
| | | | muscle | | |
| hsa-miR-20a-3p | 524 | 1545 | endothelial cells, | | |
| | | | kidney, osteogenic | | |
| | | | cells | | |
| hsa-miR-20a-5p | 525 | 1546 | endothelial cells, | | |
| | | | kidney, osteogenic | | |
| | | | cells | | |
| hsa-miR-20b-3p | 526 | 1547 | osteogenic cells | | |
| hsa-miR-20b-5p | 527 | 1548 | osteogenic cells | | |
| hsa-miR-210 | 528 | 1549 | kidney, heart, | RCC, B-cell | angiogenesis |
| | | | vascular | lymphocytes | |
| | | | endothelial cells | | |
| hsa-miR-2110 | 529 | 1550 | | rectal cancer | |
| hsa-miR-2113 | 530 | 1551 | embryonic stem | | |
| | | | cells | | |
| hsa-miR-211-3p | 531 | 1552 | melanocytes | melanoma and | |
| | | | | other cancers | |
| hsa-miR-2114-3p | 532 | 1553 | ovary, female | | |
| | | | reproductuve tract | | |
| hsa-miR-2114-5p | 533 | 1554 | ovary, female | | |
| | | | reproductuve tract | | |
| hsa-miR-2115-3p | 534 | 1555 | female | ovarian cancer | |
| | | | reproductive tract | | |
| hsa-miR-2115-5p | 535 | 1556 | female | ovarian cancer | |
| | | | reproductive tract | | |
| hsa-miR-211-5p | 536 | 1557 | melanocytes | melanoma and | |
| | | | | other cancers | |
| hsa-miR-2116-3p | 537 | 1558 | | live | |
| | | | | cancer(hepatocytes) | |
| | | | | and ovarian | |
| | | | | cancer | |
| hsa-miR-2116-5p | 538 | 1559 | | live | |
| | | | | cancer(hepatocytes) | |
| | | | | and ovarian | |
| | | | | cancer | |
| hsa-miR-2117 | 539 | 1560 | | ovarian cancer | |
| hsa-miR-212-3p | 540 | 1561 | brain(neuron), | lymphoma | |
| | | | spleen | | |
| hsa-miR-212-5p | 541 | 1562 | brain(neuron), | lymphoma | |
| | | | spleen | | |
| hsa-miR-21-3p | 542 | 1563 | glioblast, Blood | autoimmune, heart | |
| | | | (meyloid cells), | diseases, cancers | |
| | | | liver, vascular | | |
| | | | endothelial cells | | |
| hsa-miR-214-3p | 543 | 1564 | immune cerlls, | varioua cancers | immune |
| | | | pancreas | (melanoma, | response |
| | | | | pancreatic, | |
| | | | | ovarian) | |
| hsa-miR-214-5p | 544 | 1565 | immune cells, | varioua cancers | immune |
| | | | pancreas | (melanoma, | response |
| | | | | pancreatic, | |
| | | | | ovarian) | |
| hsa-miR-215 | 545 | 1566 | many tissues/cells | various cancers | cell cycle |
| | | | | (renal, colon, | arrest/p53 |
| | | | | osteosarcoma) | inducible |
| hsa-miR-21-5p | 546 | 1567 | blood (myeloid | autoimmune, heart | |
| | | | cells), liver, | diseases, cancers | |
| | | | endothelial cells | | |
| hsa-miR-216a-3p | 547 | 1568 | kidney, pancreas | | |
| hsa-miR-216a-5p | 548 | 1569 | kidney, pancreas | | |
| hsa-miR-216b | 549 | 1570 | | cancers | senescence |
| hsa-miR-217 | 550 | 1571 | endothelial cells | various cancer | |
| | | | | cells (pancreas, | |
| | | | | kidney, breast) | |
| hsa-miR-218-1-3p | 551 | 1572 | endothelial cells | various cancer | |
| | | | | cells (gastric | |
| | | | | tumor, bladder, | |
| | | | | cervical, etc) | |
| hsa-miR-218-2-3p | 552 | 1573 | | various cancer | |
| | | | | cells (gastric | |
| | | | | tumor, bladder, | |
| | | | | cervical, etc) | |
| hsa-miR-218-5p | 553 | 1574 | | various cancer | |
| | | | | cells (gastric | |
| | | | | tumor, bladder, | |
| | | | | cervical, etc) | |
| hsa-miR-219-1-3p | 554 | 1575 | brain, | | |
| | | | oligodendrocytes | | |
| hsa-miR-219-2-3p | 555 | 1576 | brain, | | |
| | | | oligodendrocytes | | |
| hsa-miR-219-5p | 556 | 1577 | brain, | | |
| | | | oligodendrocytes | | |
| hsa-miR-221-3p | 557 | 1578 | endothelial cells, | leukemia and other | angiogenesis/ |
| | | | immune cells | cancers | vasculogenesis |
| hsa-miR-221-5p | 558 | 1579 | endothelial cells, | leukemia and other | angiogenesis/ |
| | | | immune cells | cancers | vasculogenesis |
| hsa-miR-222-3p | 559 | 1580 | endothelial cells | various cancers | angiogenesis |
| hsa-miR-222-5p | 560 | 1581 | endothelial cells | various cancers | angiogenesis |
| hsa-miR-223-3p | 561 | 1582 | meyloid cells | leukemia | |
| hsa-miR-223-5p | 562 | 1583 | meyloid cells | leukemia | |
| hsa-miR-22-3p | 563 | 1584 | many tissues/cells | various cancers | tumorigenesis |
| hsa-miR-224-3p | 564 | 1585 | blood(plasma), | cancers and | |
| | | | ovary | inflammation | |
| hsa-miR-224-5p | 565 | 1586 | blood(plasma), | cancers and | |
| | | | ovary | inflammation | |
| hsa-miR-22-5p | 566 | 1587 | many tissues/cells | Various cancers | tumorigenesis |
| hsa-miR-2276 | 567 | 1588 | | breast cancer | |
| hsa-miR-2277-3p | 568 | 1589 | female | | |
| | | | reproductive tract | | |
| hsa-miR-2277-5p | 569 | 1590 | female | | |
| | | | reproductive tract | | |
| hsa-miR-2278 | 570 | 1591 | | breast cancer | |
| hsa-miR-2355-3p | 571 | 1592 | embryonic stem | | |
| | | | cells | | |
| hsa-miR-2355-5p | 572 | 1593 | embryonic stem | | |
| | | | cells | | |
| hsa-miR-2392 | 573 | 1594 | identified in B- | | |
| | | | cells | | |
| hsa-miR-23a-3p | 574 | 1595 | brain(astrocyte), | Cancers | |
| | | | endothelial cells, | | |
| | | | blood(erythroid) | | |
| hsa-miR-23a-5p | 575 | 1596 | brain(astrocyte), | cancers | |
| | | | endothelial cells, | | |
| | | | blood(erythroid) | | |
| hsa-miR-23b-3p | 576 | 1597 | blood, meyloid | cancers (renal | |
| | | | cells | cancer, | |
| | | | | glioblastoma, | |
| | | | | prostate, etc) | |
| | | | | and autoimmune | |
| hsa-miR-23b-5p | 577 | 1598 | blood, meyloid | cancers(glioblastoma, | |
| | | | cells | prostate, etc) | |
| | | | | and autoimmune | |
| hsa-miR-23c | 578 | 1599 | | cervical cancer | |
| hsa-miR-24-1-5p | 579 | 1600 | lung, meyloid cells | | |
| hsa-miR-24-2-5p | 580 | 1601 | lung, meyloid cells | | |
| hsa-miR-24-3p | 581 | 1602 | lung, meyloid cells | | |
| hsa-miR-2467-3p | 582 | 1603 | | breast cancer | |
| hsa-miR-2467-5p | 583 | 1604 | | breast cancer | |
| hsa-miR-25-3p | 584 | 1605 | embryonic stem | | |
| | | | cells, airway | | |
| | | | smooth muscle | | |
| hsa-miR-25-5p | 585 | 1606 | embryonic stem | | |
| | | | cells, airway | | |
| | | | smooth muscle | | |
| hsa-miR-2681-3p | 586 | 1607 | | breast cancer | |
| hsa-miR-2681-5p | 587 | 1608 | | breast cancer | |
| hsa-miR-2682-3p | 588 | 1609 | | | |
| hsa-miR-2682-5p | 589 | 1610 | | | |
| hsa-miR-26a-1-3p | 590 | 1611 | embryonic stem | CLL and other | cell cycle and |
| | | | cells, blood, other | cancers | differentiation |
| | | | tissues | | |
| hsa-miR-26a-2-3p | 591 | 1612 | blood, other | CLL and other | cell cycle and |
| | | | tissues | cancers | differentiation |
| hsa-miR-26a-5p | 592 | 1613 | blood, other | CLL and other | cell cycle and |
| | | | tissues | cancers | differentiation |
| hsa-miR-26b-3p | 593 | 1614 | hematopoietic | | |
| | | | cells | | |
| hsa-miR-26b-5p | 594 | 1615 | hematopoietic | | |
| | | | cells | | |
| hsa-miR-27a-3p | 595 | 1616 | meyloid cells | various cancer | |
| | | | | cells | |
| hsa-miR-27a-5p | 596 | 1617 | meyloid cells | various cancer | |
| | | | | cells | |
| hsa-miR-27b-3p | 597 | 1618 | meyloid cells, | various cancer | pro-angiogenic |
| | | | vascular | cells | |
| | | | endothelial cells | | |
| hsa-miR-27b-5p | 598 | 1619 | meyloid cells, | various cancer | pro-angiogenic |
| | | | vascular | cells | |
| | | | endothelial cells | | |
| hsa-miR-28-3p | 599 | 1620 | blood(immune | B/T cell | |
| | | | cells) | lymphoma | |
| hsa-miR-28-5p | 600 | 1621 | blood(immune | B/T cell | |
| | | | cells) | lymphoma | |
| hsa-miR-2861 | 601 | 1622 | osteoblasts | basal cell | |
| | | | | carcinoma | |
| hsa-miR-2909 | 602 | 1623 | T-Lymphocytes | | |
| hsa-miR-296-3p | 603 | 1624 | kidney, heart, lung, | | angiogenesis |
| | | | entothelial cells | | |
| hsa-miR-2964a-3p | 604 | 1625 | | | |
| hsa-miR-2964a-5p | 605 | 1626 | | | |
| hsa-miR-296-5p | 606 | 1627 | lung, liver, | | angiogenesis |
| | | | endothelial cells | | |
| hsa-miR-297 | 607 | 1628 | oocyte and | | |
| | | | prostate | | |
| hsa-miR-298 | 608 | 1629 | | breast cancer | |
| hsa-miR-299-3p | 609 | 1630 | | myeloid | |
| | | | | leukaemia, | |
| | | | | hepatoma, breast | |
| | | | | cancer | |
| hsa-miR-299-5p | 610 | 1631 | | myeloid | |
| | | | | leukaemia, | |
| | | | | hepatoma, breast | |
| | | | | cancer | |
| hsa-miR-29a-3p | 611 | 1632 | immuno system | CLL, other | tumor |
| | | | | cancers, | suppression, |
| | | | | neurodegenative | immune |
| | | | | disease | modulation |
| hsa-miR-29a-5p | 612 | 1633 | immuno system | CLL, other | tumor |
| | | | | cancers, | suppression, |
| | | | | neurodegenative | immune |
| | | | | disease | modulation |
| hsa-miR-29b-1-5p | 613 | 1634 | immuno system | CLL, other | tumor |
| | | | | cancers, | suppression, |
| | | | | neurodegenative | immune |
| | | | | disease | modulation |
| hsa-miR-29b-2-5p | 614 | 1635 | immuno system | CLL, other cancers | tumor |
| | | | | | suppression, |
| | | | | | immune |
| | | | | | modulation |
| hsa-miR-29b-3p | 615 | 1636 | immuno system | CLL, other cancers | tumor |
| | | | | | suppression, |
| | | | | | immune |
| | | | | | modulation |
| hsa-miR-29c-3p | 616 | 1637 | immuno system | CLL, other cancers | tumor |
| | | | | | suppression, |
| | | | | | immune |
| | | | | | modulation |
| hsa-miR-29c-5p | 617 | 1638 | immuno system | CLL, other cancers | tumor |
| | | | | | suppression, |
| | | | | | immune |
| | | | | | modulation |
| hsa-miR-300 | 618 | 1639 | osteoblast | Bladder cancer | |
| hsa-miR-301a-3p | 619 | 1640 | embryonic stem | | |
| | | | cells | | |
| hsa-miR-301a-5p | 620 | 1641 | embryonic stem | | |
| | | | cells | | |
| hsa-miR-301b | 621 | 1642 | | esophageal | |
| | | | | adenocarcinoma, | |
| | | | | colonic cancer | |
| hsa-miR-302a-3p | 622 | 1643 | embryonic stem | | lipid metabolism |
| | | | cells, lipid | | |
| | | | metabolism | | |
| hsa-miR-302a-5p | 623 | 1644 | embryonic stem | | lipid metabolism |
| | | | cells, lipid | | |
| | | | metabolism | | |
| hsa-miR-302b-3p | 624 | 1645 | embryonic stem | | |
| | | | cells | | |
| hsa-miR-302b-5p | 625 | 1646 | embryonic stem | | |
| | | | cells | | |
| hsa-miR-302c-3p | 626 | 1647 | embryonic stem | | |
| | | | cells | | |
| hsa-miR-302c-5p | 627 | 1648 | embryonic stem | | |
| | | | cells | | |
| hsa-miR-302d-3p | 628 | 1649 | embryonic stem | | |
| | | | cells | | |
| hsa-miR-302d-5p | 629 | 1650 | embryonic stem | | |
| | | | cells | | |
| hsa-miR-302e | 630 | 1651 | embryoid body | | |
| | | | cells | | |
| hsa-miR-302f | 631 | 1652 | | gastric cancer | |
| hsa-miR-3064-3p | 632 | 1653 | | | |
| hsa-miR-3064-5p | 633 | 1654 | | | |
| hsa-miR-3065-3p | 634 | 1655 | oligodendrocytes | anti-virus response | |
| hsa-miR-3065-5p | 635 | 1656 | oligodendrocytes | solid tumors | |
| hsa-miR-3074-3p | 636 | 1657 | | various | |
| | | | | cancer(melanoma, | |
| | | | | breast) | |
| hsa-miR-3074-5p | 637 | 1658 | | various | |
| | | | | cancer(melanoma, | |
| | | | | breast) | |
| hsa-miR-30a-3p | 638 | 1659 | kidney, pancreatic | various cancers | autophagy |
| | | | cells | | |
| hsa-miR-30a-5p | 639 | 1660 | CNS(prefrontal | glioma, colon | autophagy |
| | | | cortex), other | carcinoma | |
| | | | tissues | | |
| hsa-miR-30b-3p | 640 | 1661 | kidney, adipose, | | |
| | | | CNS(prefrontal | | |
| | | | cortex) | | |
| hsa-miR-30b-5p | 641 | 1662 | kidney, adipose, | | |
| | | | CNS(prefrontal | | |
| | | | cortex) | | |
| hsa-miR-30c-1-3p | 642 | 1663 | kidney, adipose, | | |
| | | | CNS(prefrontal | | |
| | | | cortex) | | |
| hsa-miR-30c-2-3p | 643 | 1664 | kidney, adipose, | | |
| | | | CNS(prefrontal | | |
| | | | cortex) | | |
| hsa-miR-30c-5p | 644 | 1665 | kidney, adipose, | | |
| | | | CNS(prefrontal | | |
| | | | cortex) | | |
| hsa-miR-30d-3p | 645 | 1666 | CNS (prefrontal | | |
| | | | cortex | | |
| hsa-miR-30d-5p | 646 | 1667 | CNS (prefrontal | | |
| | | | cortex, embryoid | | |
| | | | body cells | | |
| hsa-miR-30e-3p | 647 | 1668 | myeloid cells, | | |
| | | | glia cells | | |
| hsa-miR-30e-5p | 648 | 1669 | myeloid cells, | | |
| | | | glia cells | | |
| hsa-miR-3115 | 649 | 1670 | | various cancer | |
| | | | | (melanoma, breast | |
| | | | | tumor) | |
| hsa-miR-3116 | 650 | 1671 | discovered in the | | |
| | | | melanoma | | |
| | | | miRNAome | | |
| hsa-miR-3117-3p | 651 | 1672 | discovered in the | | |
| | | | melanoma | | |
| | | | miRNAome | | |
| hsa-miR-3117-5p | 652 | 1673 | discovered in the | | |
| | | | melanoma | | |
| | | | miRNAome | | |
| hsa-miR-3118 | 653 | 1674 | discovered in the | | |
| | | | melanoma | | |
| | | | miRNAome | | |
| hsa-miR-3119 | 654 | 1675 | discovered in the | | |
| | | | melanoma | | |
| | | | miRNAome | | |
| hsa-miR-3120-3p | 655 | 1676 | discovered in the | breast tumor | |
| | | | melanoma | | |
| | | | miRNAome | | |
| hsa-miR-3120-5p | 656 | 1677 | discovered in the | breast tumor | |
| | | | melanoma | | |
| | | | miRNAome | | |
| hsa-miR-3121-3p | 657 | 1678 | discovered in the | breast tumor | |
| | | | melanoma | | |
| | | | miRNAome | | |
| hsa-miR-3121-5p | 658 | 1679 | discovered in the | breast tumor | |
| | | | melanoma | | |
| | | | miRNAome | | |
| hsa-miR-3122 | 659 | 1680 | discovered in the | | |
| | | | melanoma | | |
| | | | miRNAome | | |
| hsa-miR-3123 | 660 | 1681 | discovered in the | | |
| | | | melanoma | | |
| | | | miRNAome | | |
| hsa-miR-3124-3p | 661 | 1682 | discovered in the | breast tumor | |
| | | | melanoma | | |
| | | | miRNAome, ovary | | |
| hsa-miR-3124-5p | 662 | 1683 | discovered in the | breast tumor | |
| | | | melanoma | | |
| | | | miRNAome, ovary | | |
| hsa-miR-3125 | 663 | 1684 | discovered in the | | |
| | | | melanoma | | |
| | | | miRNAome | | |
| hsa-miR-3126-3p | 664 | 1685 | discovered in the | breast tumor | |
| | | | melanoma | | |
| | | | miRNAome, ovary | | |
| hsa-miR-3126-5p | 665 | 1686 | discovered in the | breast tumor | |
| | | | melanoma | | |
| | | | miRNAome, ovary | | |
| hsa-miR-3127-3p | 666 | 1687 | discovered in the | breast tumor | |
| | | | melanoma | | |
| | | | miRNAome | | |
| hsa-miR-3127-5p | 667 | 1688 | discovered in the | breast tumor | |
| | | | melanoma | | |
| | | | miRNAome | | |
| hsa-miR-3128 | 668 | 1689 | discovered in the | breast tumor | |
| | | | melanoma | | |
| | | | miRNAome | | |
| hsa-miR-3129-3p | 669 | 1690 | discovered in the | breast tumor | |
| | | | melanoma | | |
| | | | miRNAome, ovary | | |
| hsa-miR-3129-5p | 670 | 1691 | discovered in the | breast tumor | |
| | | | melanoma | | |
| | | | miRNAome, ovary | | |
| hsa-miR-3130-3p | 671 | 1692 | discovered in the | breast tumor | |
| | | | melanoma | | |
| | | | miRNAome, ovary | | |
| hsa-miR-3130-5p | 672 | 1693 | discovered in the | breast tumor | |
| | | | melanoma | | |
| | | | miRNAome, ovary | | |
| hsa-miR-3131 | 673 | 1694 | discovered in the | breast tumor | |
| | | | melanoma | | |
| | | | miRNAome | | |
| hsa-miR-3132 | 674 | 1695 | discovered in the | | |
| | | | melanoma | | |
| | | | miRNAome | | |
| hsa-miR-3133 | 675 | 1696 | discovered in the | | |
| | | | melanoma | | |
| | | | miRNAome | | |
| hsa-miR-3134 | 676 | 1697 | discovered in the | | |
| | | | melanoma | | |
| | | | miRNAome | | |
| hsa-miR-3135a | 677 | 1698 | discovered in the | | |
| | | | melanoma | | |
| | | | miRNAome | | |
| hsa-miR-3135b | 678 | 1699 | discovered in B | | |
| | | | cells | | |
| hsa-miR-3136-3p | 679 | 1700 | discovered in the | lymphoblastic | |
| | | | melanoma | leukaemia and | |
| | | | miRNAome | breast tumor | |
| hsa-miR-3136-5p | 680 | 1701 | discovered in the | lymphoblastic | |
| | | | melanoma | leukaemia and | |
| | | | miRNAome | breast tumor | |
| hsa-miR-3137 | 681 | 1702 | discovered in the | | |
| | | | melanoma | | |
| | | | miRNAome | | |
| hsa-miR-3138 | 682 | 1703 | discovered in the | | |
| | | | melanoma | | |
| | | | miRNAome, ovary | | |
| hsa-miR-3139 | 683 | 1704 | discovered in the | | |
| | | | melanoma | | |
| | | | miRNAome | | |
| hsa-miR-31-3p | 684 | 1705 | | | |
| hsa-miR-3140-3p | 685 | 1706 | discovered in the | lymphoblastic | |
| | | | melanoma | leukaemia and | |
| | | | miRNAome, ovary | breast tumor | |
| hsa-miR-3140-5p | 686 | 1707 | discovered in the | lymphoblastic | |
| | | | melanoma | leukaemia and | |
| | | | miRNAome, ovary | breast tumor | |
| hsa-miR-3141 | 687 | 1708 | discovered in the | | |
| | | | melanoma | | |
| | | | miRNAome | | |
| hsa-miR-3142 | 688 | 1709 | discovered in the | | |
| | | | melanoma | | |
| | | | miRNAome; | | |
| | | | immune cells | | |
| hsa-miR-3143 | 689 | 1710 | discovered in the | breast tumor | |
| | | | melanoma | | |
| | | | miRNAome | | |
| hsa-miR-3144-3p | 690 | 1711 | discovered in the | | |
| | | | melanoma | | |
| | | | miRNAome, ovary | | |
| hsa-miR-3144-5p | 691 | 1712 | discovered in the | | |
| | | | melanoma | | |
| | | | miRNAome, ovary | | |
| hsa-miR-3145-3p | 692 | 1713 | discovered in the | breast tumor | |
| | | | melanoma | | |
| | | | miRNAome | | |
| hsa-miR-3145-5p | 693 | 1714 | discovered in the | breast tumor | |
| | | | melanoma | | |
| | | | miRNAome | | |
| hsa-miR-3146 | 694 | 1715 | discovered in the | breast tumor | |
| | | | melanoma | | |
| | | | miRNAome | | |
| hsa-miR-3147 | 695 | 1716 | discovered in the | | |
| | | | melanoma | | |
| | | | miRNAome | | |
| hsa-miR-3148 | 696 | 1717 | discovered in the | | |
| | | | melanoma | | |
| | | | miRNAome | | |
| hsa-miR-3149 | 697 | 1718 | discovered in the | | |
| | | | melanoma | | |
| | | | miRNAome, ovary | | |
| hsa-miR-3150a-3p | 698 | 1719 | discovered in the | breast tumor | |
| | | | melanoma | | |
| | | | miRNAome | | |
| hsa-miR-3150a-5p | 699 | 1720 | discovered in the | breast tumor | |
| | | | melanoma | | |
| | | | miRNAome | | |
| hsa-miR-3150b-3p | 700 | 1721 | discovered in the | breast tumor and | |
| | | | melanoma | lymphoblastic | |
| | | | miRNAome | leukaemia | |
| hsa-miR-3150b-5p | 701 | 1722 | discovered in the | breast tumor and | |
| | | | melanoma | lymphoblastic | |
| | | | miRNAome | leukaemia | |
| hsa-miR-3151 | 702 | 1723 | discovered in the | lymphoblastic | |
| | | | melanoma | leukaemia | |
| | | | miRNAome | | |
| hsa-miR-3152-3p | 703 | 1724 | discovered in the | breast tumor | |
| | | | melanoma | | |
| | | | miRNAome, ovary | | |
| hsa-miR-3152-5p | 704 | 1725 | discovered in the | breast tumor | |
| | | | melanoma | | |
| | | | miRNAome, ovary | | |
| hsa-miR-3153 | 705 | 1726 | discovered in the | | |
| | | | melanoma | | |
| | | | miRNAome | | |
| hsa-miR-3154 | 706 | 1727 | discovered in the | lymphoblastic | |
| | | | melanoma | leukaemia | |
| | | | miRNAome | | |
| hsa-miR-3155a | 707 | 1728 | discovered in the | | |
| | | | melanoma | | |
| | | | miRNAome | | |
| hsa-miR-3155b | 708 | 1729 | discovered in B | | |
| | | | cells | | |
| hsa-miR-3156-3p | 709 | 1730 | discovered in the | breast tumor | |
| | | | melanoma | | |
| | | | miRNAome | | |
| hsa-miR-3156-5p | 710 | 1731 | discovered in the | breast tumor | |
| | | | melanoma | | |
| | | | miRNAome | | |
| hsa-miR-3157-3p | 711 | 1732 | discovered in the | breast tumor | |
| | | | melanoma | | |
| | | | miRNAome | | |
| hsa-miR-3157-5p | 712 | 1733 | discovered in the | breast tumor | |
| | | | melanoma | | |
| | | | miRNAome | | |
| hsa-miR-3158-3p | 713 | 1734 | discovered in the | breast tumor | |
| | | | melanoma | | |
| | | | miRNAome, ovary | | |
| hsa-miR-3158-5p | 714 | 1735 | discovered in the | breast tumor | |
| | | | melanoma | | |
| | | | miRNAome, ovary | | |
| hsa-miR-3159 | 715 | 1736 | discovered in the | | |
| | | | melanoma | | |
| | | | miRNAome | | |
| hsa-miR-31-5p | 716 | 1737 | | various cancer | |
| | | | | cells (breast, lung, | |
| | | | | prostate) | |
| hsa-miR-3160-3p | 717 | 1738 | discovered in the | breast tumor | |
| | | | melanoma | | |
| | | | miRNAome | | |
| hsa-miR-3160-5p | 718 | 1739 | discovered in the | breast tumor | |
| | | | melanoma | | |
| | | | miRNAome | | |
| hsa-miR-3161 | 719 | 1740 | discovered in the | | |
| | | | melanoma | | |
| | | | miRNAome | | |
| hsa-miR-3162-3p | 720 | 1741 | discovered in the | breast tumor | |
| | | | melanoma | | |
| | | | miRNAome | | |
| hsa-miR-3162-5p | 721 | 1742 | discovered in the | breast tumor | |
| | | | melanoma | | |
| | | | miRNAome | | |
| hsa-miR-3163 | 722 | 1743 | discovered in the | | |
| | | | melanoma | | |
| | | | miRNAome | | |
| hsa-miR-3164 | 723 | 1744 | discovered in the | | |
| | | | melanoma | | |
| | | | miRNAome | | |
| hsa-miR-3165 | 724 | 1745 | discovered in the | breast tumor | |
| | | | melanoma | | |
| | | | miRNAome | | |
| hsa-miR-3166 | 725 | 1746 | discovered in the | | |
| | | | melanoma | | |
| | | | miRNAome | | |
| hsa-miR-3167 | 726 | 1747 | discovered in the | | |
| | | | melanoma | | |
| | | | miRNAome, ovary | | |
| hsa-miR-3168 | 727 | 1748 | discovered in the | | |
| | | | melanoma | | |
| | | | miRNAome | | |
| hsa-miR-3169 | 728 | 1749 | discovered in the | | |
| | | | melanoma | | |
| | | | miRNAome | | |
| hsa-miR-3170 | 729 | 1750 | discovered in the | breast tumor | |
| | | | melanoma | | |
| | | | miRNAome | | |
| hsa-miR-3171 | 730 | 1751 | discovered in the | | |
| | | | melanoma | | |
| | | | miRNAome, ovary | | |
| hsa-miR-3173-3p | 731 | 1752 | discovered in the | breast tumor | |
| | | | melanoma | | |
| | | | miRNAome | | |
| hsa-miR-3173-5p | 732 | 1753 | discovered in the | breast tumor | |
| | | | melanoma | | |
| | | | miRNAome | | |
| hsa-miR-3174 | 733 | 1754 | discovered in the | | |
| | | | melanoma | | |
| | | | miRNAome | | |
| hsa-miR-3175 | 734 | 1755 | discovered in the | breast tumor | |
| | | | melanoma | | |
| | | | miRNAome, ovary | | |
| hsa-miR-3176 | 735 | 1756 | discovered in the | breast tumor | |
| | | | melanoma | | |
| | | | miRNAome | | |
| hsa-miR-3177-3p | 736 | 1757 | discovered in the | breast tumor and | |
| | | | melanoma | lymphoblastic | |
| | | | miRNAome | leukaemia | |
| hsa-miR-3177-5p | 737 | 1758 | discovered in the | breast tumor and | |
| | | | melanoma | lymphoblastic | |
| | | | miRNAome | leukaemia | |
| hsa-miR-3178 | 738 | 1759 | discovered in the | | |
| | | | melanoma | | |
| | | | miRNAome | | |
| hsa-miR-3179 | 739 | 1760 | discovered in the | | |
| | | | melanoma | | |
| | | | miRNAome | | |
| hsa-miR-3180 | 740 | 1761 | discovered in the | breast tumor | |
| | | | melanoma | | |
| | | | miRNAome, ovary | | |
| hsa-miR-3180-3p | 741 | 1762 | discovered in | | |
| | | | breast tunor | | |
| hsa-miR-3180-5p | 742 | 1763 | discovered in | | |
| | | | breast tumor | | |
| hsa-miR-3181 | 743 | 1764 | discovered in the | | |
| | | | melanoma | | |
| | | | miRNAome | | |
| hsa-miR-3182 | 744 | 1765 | discovered in the | | |
| | | | melanoma | | |
| | | | miRNAome | | |
| hsa-miR-3183 | 745 | 1766 | discovered in the | | |
| | | | melanoma | | |
| | | | miRNAome | | |
| hsa-miR-3184-3p | 746 | 1767 | discovered in the | | |
| | | | melanoma | | |
| | | | miRNAome | | |
| hsa-miR-3184-5p | 747 | 1768 | discovered in the | | |
| | | | melanoma | | |
| | | | miRNAome | | |
| hsa-miR-3185 | 748 | 1769 | discovered in the | | |
| | | | melanoma | | |
| | | | miRNAome | | |
| hsa-miR-3186-3p | 749 | 1770 | discovered in the | | |
| | | | melanoma | | |
| | | | miRNAome, ovary | | |
| hsa-miR-3186-5p | 750 | 1771 | discovered in the | | |
| | | | melanoma | | |
| | | | miRNAome, ovary | | |
| hsa-miR-3187-3p | 751 | 1772 | discovered in the | breast tumor | |
| | | | melanoma | | |
| | | | miRNAome | | |
| hsa-miR-3187-5p | 752 | 1773 | discovered in the | breast tumor | |
| | | | melanoma | | |
| | | | miRNAome | | |
| hsa-miR-3188 | 753 | 1774 | discovered in the | | |
| | | | melanoma | | |
| | | | miRNAome | | |
| hsa-miR-3189-3p | 754 | 1775 | discovered in the | breast tumor | |
| | | | melanoma | | |
| | | | miRNAome | | |
| hsa-miR-3189-5p | 755 | 1776 | discovered in the | breast tumor | |
| | | | melanoma | | |
| | | | miRNAome | | |
| hsa-miR-3190-3p | 756 | 1777 | discovered in the | lymphoblastic | |
| | | | melanoma | leukaemia | |
| | | | miRNAome | | |
| hsa-miR-3190-5p | 757 | 1778 | discovered in the | lymphoblastic | |
| | | | melanoma | leukaemia | |
| | | | miRNAome | | |
| hsa-miR-3191-3p | 758 | 1779 | discovered in the | | |
| | | | melanoma | | |
| | | | miRNAome | | |
| hsa-miR-3191-5p | 759 | 1780 | discovered in the | | |
| | | | melanoma | | |
| | | | miRNAome | | |
| hsa-miR-3192 | 760 | 1781 | discovered in the | breast tumor | |
| | | | melanoma | | |
| | | | miRNAome | | |
| hsa-miR-3193 | 761 | 1782 | discovered in the | | |
| | | | melanoma | | |
| | | | miRNAome | | |
| hsa-miR-3194-3p | 762 | 1783 | discovered in the | breast tumor | |
| | | | melanoma | | |
| | | | miRNAome | | |
| hsa-miR-3194-5p | 763 | 1784 | discovered in the | breast tumor | |
| | | | melanoma | | |
| | | | miRNAome | | |
| hsa-miR-3195 | 764 | 1785 | discovered in the | | |
| | | | melanoma | | |
| | | | miRNAome | | |
| hsa-miR-3196 | 765 | 1786 | | basal cell | |
| | | | | carcinoma | |
| hsa-miR-3197 | 766 | 1787 | discovered in the | | |
| | | | melanoma | | |
| | | | miRNAome | | |
| hsa-miR-3198 | 767 | 1788 | discovered in the | breast tumor | |
| | | | melanoma | | |
| | | | miRNAome | | |
| hsa-miR-3199 | 768 | 1789 | discovered in the | | |
| | | | melanoma | | |
| | | | miRNAome | | |
| hsa-miR-3200-3p | 769 | 1790 | discovered in the | breast tumor | |
| | | | melanoma | | |
| | | | miRNAome, ovary | | |
| hsa-miR-3200-5p | 770 | 1791 | discovered in the | breast tumor | |
| | | | melanoma | | |
| | | | miRNAome, ovary | | |
| hsa-miR-3201 | 771 | 1792 | discovered in the | | |
| | | | melanoma | | |
| | | | miRNAome, | | |
| hsa-miR-3202 | 772 | 1793 | discovered in the | | |
| | | | melanoma | | |
| | | | miRNAome, epithelial | | |
| | | | cell BEAS2B | | |
| hsa-miR-320a | 773 | 1794 | blood, | colon cancer cells, | |
| | | | heart(myocardiac) | heart disease | |
| hsa-miR-320b | 774 | 1795 | central nevous | | |
| | | | system | | |
| hsa-miR-320c | 775 | 1796 | chondrocyte | | cartilage |
| | | | | | metabolism |
| hsa-miR-320d | 776 | 1797 | | cancer stem cells | |
| hsa-miR-320e | 777 | 1798 | neural cells | | |
| hsa-miR-323a-3p | 778 | 1799 | neurons | myeloid | |
| | | | | leukaemia, | |
| | | | | mudulla thyroid | |
| | | | | carcinoma | |
| hsa-miR-323a-5p | 779 | 1800 | neurons | myeloid | |
| | | | | leukaemia, | |
| | | | | mudulla thyroid | |
| | | | | carcinoma | |
| hsa-miR-323b-3p | 780 | 1801 | | myeloid leukaemia | |
| hsa-miR-323b-5p | 781 | 1802 | | myeloid leukaemia | |
| hsa-miR-32-3p | 782 | 1803 | blood, glia | various cancers | |
| | | | | (lung, kidney, | |
| | | | | prostate, etc), | |
| | | | | virus infection | |
| hsa-miR-324-3p | 783 | 1804 | kidney | | |
| hsa-miR-324-5p | 784 | 1805 | neurons | tumor cells | |
| hsa-miR-325 | 785 | 1806 | neurons, placenta | | |
| hsa-miR-32-5p | 786 | 1807 | blood, glia | various cancers | |
| | | | | (lung, kidney, | |
| | | | | prostate, etc), | |
| | | | | virus infection | |
| hsa-miR-326 | 787 | 1808 | neurons | tumor cells | |
| hsa-miR-328 | 788 | 1809 | neuron, blood | tumor cells | |
| hsa-miR-329 | 789 | 1810 | brain and platele | | |
| hsa-miR-330-3p | 790 | 1811 | | various cancers | |
| | | | | (prostate, | |
| | | | | glioblastoma, | |
| | | | | colorectal) | |
| hsa-miR-330-5p | 791 | 1812 | | various cancers | |
| | | | | (prostate, | |
| | | | | glioblastoma, | |
| | | | | colorectal) | |
| hsa-miR-331-3p | 792 | 1813 | | gastric cancer | |
| hsa-miR-331-5p | 793 | 1814 | lymphocytes | | |
| hsa-miR-335-3p | 794 | 1815 | kidney, breast | RCC, multiple | |
| | | | | myeloma | |
| hsa-miR-335-5p | 795 | 1816 | kidney, breast | RCC, multiple | |
| | | | | myeloma | |
| hsa-miR-337-3p | 796 | 1817 | lung | gastric cancer | |
| hsa-miR-337-5p | 797 | 1818 | lung | | |
| hsa-miR-338-3p | 798 | 1819 | epithelial cells, | gastric, rectal | |
| | | | oligodendrocytes | cancer cells, | |
| | | | | osteosarcoma | |
| hsa-miR-338-5p | 799 | 1820 | oligodendrocytes | gastric cancer | |
| hsa-miR-339-3p | 800 | 1821 | immune cell | | |
| hsa-miR-339-5p | 801 | 1822 | immune cell | | |
| hsa-miR-33a-3p | 802 | 1823 | pancreatic islet, | | lipid metabolism |
| | | | lipid metabolism | | |
| hsa-miR-33a-5p | 803 | 1824 | pancreatic islet, | | lipid metabolism |
| | | | lipid metabolism | | |
| hsa-miR-33b-3p | 804 | 1825 | lipid metabolism | | lipid metabolism |
| hsa-miR-33b-5p | 805 | 1826 | lipid metabolism | | lipid metabolism |
| hsa-miR-340-3p | 806 | 1827 | | various cancers | |
| hsa-miR-340-5p | 807 | 1828 | embryoid body | | |
| | | | cells | | |
| hsa-miR-342-3p | 808 | 1829 | brain, circulating | multiple myeloma, | |
| | | | plasma | other cancers | |
| hsa-miR-342-5p | 809 | 1830 | circulating plasma | multiple myeloma, | |
| | | | | other cancers | |
| hsa-miR-345-3p | 810 | 1831 | hematopoietic | follicular | |
| | | | cells | lymphoma, other | |
| | | | | cancers | |
| hsa-miR-345-5p | 811 | 1832 | hematopoietic | follicular | |
| | | | cells | lymphoma, other | |
| | | | | cancers | |
| hsa-miR-346 | 812 | 1833 | immume cells | cancers and | |
| | | | | autoimmune | |
| hsa-miR-34a-3p | 813 | 1834 | breast, meyloid | gastric cancer, | tumor |
| | | | cells, ciliated | CLL, other | suppressor, p53 |
| | | | epithelial cells | | inducible |
| hsa-miR-34a-5p | 814 | 1835 | breast, meyloid | gastric cancer, | tumor |
| | | | cells, ciliated | CLL, other | suppressor, p53 |
| | | | epithelial cells | | inducible |
| hsa-miR-34b-3p | 815 | 1836 | ciliated epithelial | various cancers | tumor |
| | | | cells | | suppressor, p53 |
| | | | | | inducible |
| hsa-miR-34b-5p | 816 | 1837 | ciliated epithelial | various cancers | tumor |
| | | | cells | | suppressor, p53 |
| | | | | | inducible |
| hsa-miR-34c-3p | 817 | 1838 | ciliated epithelial | various cancers | tumor |
| | | | cells, placenta | | suppressor, p53 |
| | | | | | inducible |
| hsa-miR-34c-5p | 818 | 1839 | ciliated epithelial | various cancers | tumor |
| | | | cells, placenta | | suppressor, p53 |
| | | | | | inducible |
| hsa-miR-3529-3p | 819 | 1840 | discovered in | | |
| | | | breast tumor | | |
| hsa-miR-3529-5p | 820 | 1841 | discovered in | | |
| | | | breast tumor | | |
| hsa-miR-3591-3p | 821 | 1842 | discovered in | | |
| | | | breast tumor | | |
| hsa-miR-3591-5p | 822 | 1843 | discovered in | | |
| | | | breast tumor | | |
| hsa-miR-3605-3p | 823 | 1844 | discovered in | | |
| | | | reprodcutive tracts | | |
| hsa-miR-3605-5p | 824 | 1845 | discovered in | | |
| | | | reprodcutive tracts | | |
| hsa-miR-3606-3p | 825 | 1846 | discovered in | | |
| | | | cervical tumors | | |
| hsa-miR-3606-5p | 826 | 1847 | discovered in | | |
| | | | cervical tumors | | |
| hsa-miR-3607-3p | 827 | 1848 | discovered in | | |
| | | | cervical tumors | | |
| hsa-miR-3607-5p | 828 | 1849 | discovered in | | |
| | | | cervical tumors | | |
| hsa-miR-3609 | 829 | 1850 | discovered in | | |
| | | | cervical tumors | | |
| hsa-miR-3610 | 830 | 1851 | discovered in | | |
| | | | cervical tumors | | |
| hsa-miR-3611 | 831 | 1852 | discovered in | | |
| | | | cervical tumors | | |
| hsa-miR-3612 | 832 | 1853 | discovered in | | |
| | | | cervical tumors | | |
| hsa-miR-3613-3p | 833 | 1854 | discovered in | | |
| | | | cervical tumors | | |
| hsa-miR-3613-5p | 834 | 1855 | discovered in | | |
| | | | cervical tumors | | |
| hsa-miR-361-3p | 835 | 1856 | blood, endothelial | | |
| | | | cells | | |
| hsa-miR-3614-3p | 836 | 1857 | discovered in | | |
| | | | cervical and breast | | |
| | | | tumors | | |
| hsa-miR-3614-5p | 837 | 1858 | discovered in | | |
| | | | cervical and breast | | |
| | | | tumors | | |
| hsa-miR-3615 | 838 | 1859 | discovered in | | |
| | | | cervical tumors | | |
| hsa-miR-361-5p | 839 | 1860 | endothelial cells | | |
| hsa-miR-3616-3p | 840 | 1861 | discovered in | | |
| | | | cervical tumors | | |
| hsa-miR-3616-5p | 841 | 1862 | discovered in | | |
| | | | cervical tumors | | |
| hsa-miR-3617-3p | 842 | 1863 | discovered in | | |
| | | | cervical tumors | | |
| | | | and psoriasis | | |
| hsa-miR-3617-5p | 843 | 1864 | discovered in | | |
| | | | cervical tumors | | |
| | | | and psoriasis | | |
| hsa-miR-3618 | 844 | 1865 | discovered in | | |
| | | | cervical tumors | | |
| hsa-miR-3619-3p | 845 | 1866 | discovered in | | |
| | | | breast tumors | | |
| hsa-miR-3619-5p | 846 | 1867 | discovered in | | |
| | | | breast tumors | | |
| hsa-miR-3620-3p | 847 | 1868 | discovered in | | |
| | | | cervical tumors | | |
| hsa-miR-3620-5p | 848 | 1869 | discovered in | | |
| | | | cervical tumors | | |
| hsa-miR-3621 | 849 | 1870 | discovered in | | |
| | | | cervical tumors | | |
| hsa-miR-3622a-3p | 850 | 1871 | discovered in | | |
| | | | breast tumors | | |
| hsa-miR-3622a-5p | 851 | 1872 | discovered in | | |
| | | | breast tumors | | |
| hsa-miR-3622b-3p | 852 | 1873 | discovered in | | |
| | | | cervical tumors | | |
| hsa-miR-3622b-5p | 853 | 1874 | discovered in | | |
| | | | cervical tumors | | |
| hsa-miR-362-3p | 854 | 1875 | | melanoma | |
| hsa-miR-362-5p | 855 | 1876 | | melanoma | |
| hsa-miR-363-3p | 856 | 1877 | kidney stem cell, | | |
| | | | blood cells | | |
| hsa-miR-363-5p | 857 | 1878 | kidney stem cell, | | |
| | | | blood cells | | |
| hsa-miR-3646 | 858 | 1879 | discovered in solid | | |
| | | | tumor | | |
| hsa-miR-3648 | 859 | 1880 | discovered in solid | | |
| | | | tumor | | |
| hsa-miR-3649 | 860 | 1881 | discovered in solid | | |
| | | | tumor | | |
| hsa-miR-3650 | 861 | 1882 | discovered in solid | | |
| | | | tumor | | |
| hsa-miR-3651 | 862 | 1883 | discovered in solid | | |
| | | | tumor | | |
| hsa-miR-3652 | 863 | 1884 | discovered in solid | | |
| | | | tumor | | |
| hsa-miR-3653 | 864 | 1885 | discovered in solid | | |
| | | | tumor | | |
| hsa-miR-3654 | 865 | 1886 | discovered in solid | | |
| | | | tumor | | |
| hsa-miR-3655 | 866 | 1887 | discovered in solid | | |
| | | | tumor | | |
| hsa-miR-3656 | 867 | 1888 | discovered in solid | | |
| | | | tumor | | |
| hsa-miR-3657 | 868 | 1889 | discovered in solid | | |
| | | | tumor | | |
| hsa-miR-3658 | 869 | 1890 | discovered in solid | | |
| | | | tumor | | |
| hsa-miR-3659 | 870 | 1891 | discovered in | | |
| | | | breast tumors | | |
| hsa-miR-365a-3p | 871 | 1892 | | various cancer | apoptosis |
| | | | | cells (Immune | |
| | | | | cells, lung, colon, | |
| | | | | endometriotic) | |
| hsa-miR-365a-5p | 872 | 1893 | | various cancer | apoptosis |
| | | | | cells (Immune | |
| | | | | cells, lung, colon, | |
| | | | | endometriotic)) | |
| hsa-miR-365b-3p | 873 | 1894 | | various cancers | apoptosis |
| | | | | (retinoblastoma, | |
| | | | | colon, endometriotic) | |
| hsa-miR-365b-5p | 874 | 1895 | | various cancers | apoptosis |
| | | | | (colon, endometriotic) | |
| hsa-miR-3660 | 875 | 1896 | discovered in | | |
| | | | breast tumors | | |
| hsa-miR-3661 | 876 | 1897 | discovered in | | |
| | | | breast tumors | | |
| hsa-miR-3662 | 877 | 1898 | — | | |
| hsa-miR-3663-3p | 878 | 1899 | — | | |
| hsa-miR-3663-5p | 879 | 1900 | — | | |
| hsa-miR-3664-3p | 880 | 1901 | discovered in | | |
| | | | breast tumors | | |
| hsa-miR-3664-5p | 881 | 1902 | discovered in | | |
| | | | breast tumors | | |
| hsa-miR-3665 | 882 | 1903 | brain | | |
| hsa-miR-3666 | 883 | 1904 | brain | | |
| hsa-miR-3667-3p | 884 | 1905 | discovered in | | |
| | | | peripheral blood | | |
| hsa-miR-3667-5p | 885 | 1906 | discovered in | | |
| | | | peripheral blood | | |
| hsa-miR-3668 | 886 | 1907 | discovered in | | |
| | | | peripheral blood | | |
| hsa-miR-3669 | 887 | 1908 | discovered in | | |
| | | | peripheral blood | | |
| hsa-miR-3670 | 888 | 1909 | discovered in | | |
| | | | peripheral blood | | |
| hsa-miR-3671 | 889 | 1910 | discovered in | | |
| | | | peripheral blood | | |
| hsa-miR-3672 | 890 | 1911 | discovered in | | |
| | | | peripheral blood | | |
| hsa-miR-3673 | 891 | 1912 | discovered in | | |
| | | | peripheral blood | | |
| hsa-miR-367-3p | 892 | 1913 | embryonic stem | | reprogramming |
| | | | cells | | |
| hsa-miR-3674 | 893 | 1914 | discovered in | | |
| | | | peripheral blood | | |
| hsa-miR-3675-3p | 894 | 1915 | discovered in | | |
| | | | peripheral blood | | |
| hsa-miR-3675-5p | 895 | 1916 | discovered in | | |
| | | | peripheral blood | | |
| hsa-miR-367-5p | 896 | 1917 | embryonic stem | | reprogramming |
| | | | cells | | |
| hsa-miR-3676-3p | 897 | 1918 | discovered in | | |
| | | | peripheral blood | | |
| hsa-miR-3676-5p | 898 | 1919 | discovered in | | |
| | | | peripheral blood | | |
| hsa-miR-3677-3p | 899 | 1920 | discovered in | | |
| | | | peripheral blood | | |
| hsa-miR-3677-5p | 900 | 1921 | discovered in | | |
| | | | peripheral blood | | |
| hsa-miR-3678-3p | 901 | 1922 | discovered in | | |
| | | | peripheral blood | | |
| hsa-miR-3678-5p | 902 | 1923 | discovered in | | |
| | | | peripheral blood | | |
| hsa-miR-3679-3p | 903 | 1924 | discovered in | | |
| | | | peripheral blood | | |
| hsa-miR-3679-5p | 904 | 1925 | discovered in | | |
| | | | peripheral blood | | |
| hsa-miR-3680-3p | 905 | 1926 | discovered in | | |
| | | | peripheral blood | | |
| hsa-miR-3680-5p | 906 | 1927 | discovered in | | |
| | | | peripheral blood | | |
| hsa-miR-3681-3p | 907 | 1928 | discovered in | | |
| | | | peripheral blood | | |
| hsa-miR-3681-5p | 908 | 1929 | discovered in | | |
| | | | peripheral blood | | |
| hsa-miR-3682-3p | 909 | 1930 | discovered in | | |
| | | | peripheral blood | | |
| hsa-miR-3682-5p | 910 | 1931 | discovered in | | |
| | | | peripheral blood | | |
| hsa-miR-3683 | 911 | 1932 | discovered in | | |
| | | | peripheral blood | | |
| hsa-miR-3684 | 912 | 1933 | discovered in | | |
| | | | peripheral blood | | |
| hsa-miR-3685 | 913 | 1934 | discovered in | | |
| | | | peripheral blood | | |
| hsa-miR-3686 | 914 | 1935 | discovered in | | |
| | | | peripheral blood | | |
| hsa-miR-3687 | 915 | 1936 | discovered in | | |
| | | | peripheral blood | | |
| hsa-miR-3688-3p | 916 | 1937 | discovered in | | |
| | | | breast tumor | | |
| hsa-miR-3688-5p | 917 | 1938 | discovered in | | |
| | | | breast tumor | | |
| hsa-miR-3689a-3p | 918 | 1939 | discovered in | | |
| | | | female | | |
| | | | reproductuve tract | | |
| hsa-miR-3689a-5p | 919 | 1940 | discovered in | | |
| | | | female | | |
| | | | reproductuve tract | | |
| | | | and peripheral | | |
| | | | blood | | |
| hsa-miR-3689b-3p | 920 | 1941 | discovered in | | |
| | | | female | | |
| | | | reproductuve tract | | |
| | | | and peripheral | | |
| | | | blood | | |
| hsa-miR-3689b-5p | 921 | 1942 | discovered in | | |
| | | | female | | |
| | | | reproductuve tract | | |
| hsa-miR-3689c | 922 | 1943 | discovered in B | | |
| | | | cells | | |
| hsa-miR-3689d | 923 | 1944 | discovered in B | | |
| | | | cells | | |
| hsa-miR-3689e | 924 | 1945 | discovered in B | | |
| | | | cells | | |
| hsa-miR-3689f | 925 | 1946 | discovered in B | | |
| | | | cells | | |
| hsa-miR-3690 | 926 | 1947 | discovered in | | |
| | | | peripheral blood | | |
| hsa-miR-3691-3p | 927 | 1948 | discovered in | | |
| | | | peripheral blood | | |
| hsa-miR-3691-5p | 928 | 1949 | discovered in | | |
| | | | peripheral blood | | |
| hsa-miR-3692-3p | 929 | 1950 | discovered in | | |
| | | | peripheral blood | | |
| hsa-miR-3692-5p | 930 | 1951 | discovered in | | |
| | | | peripheral blood | | |
| hsa-miR-369-3p | 931 | 1952 | stem cells | | reprogramming |
| hsa-miR-369-5p | 932 | 1953 | stem cells | | reprogramming |
| hsa-miR-370 | 933 | 1954 | | acute meyloid | tumor |
| | | | | leukaemia and | suppressor, lipid |
| | | | | other cancers | metabolism |
| hsa-miR-3713 | 934 | 1955 | discovered in | | |
| | | | neuroblastoma | | |
| hsa-miR-3714 | 935 | 1956 | discovered in | | |
| | | | neuroblastoma | | |
| hsa-miR-371a-3p | 936 | 1957 | serum | | |
| hsa-miR-371a-5p | 937 | 1958 | serum | | |
| hsa-miR-371b-3p | 938 | 1959 | serum | | |
| hsa-miR-371b-5p | 939 | 1960 | serum | | |
| hsa-miR-372 | 940 | 1961 | hematopoietic | | |
| | | | cells, lung, | | |
| | | | placental (blood) | | |
| hsa-miR-373-3p | 941 | 1962 | | breast cancer | |
| hsa-miR-373-5p | 942 | 1963 | | breast cancer | |
| hsa-miR-374a-3p | 943 | 1964 | muscle | breast and lung | myogenic |
| | | | (myoblasts) | cancer | differentiation |
| hsa-miR-374a-5p | 944 | 1965 | muscle | breast and lung | myogenic |
| | | | (myoblasts) | cancer | differentiation |
| hsa-miR-374b-3p | 945 | 1966 | muscle | | myogenic |
| | | | (myoblasts) | | differentiation |
| hsa-miR-374b-5p | 946 | 1967 | muscle | | myogenic |
| | | | (myoblasts) | | differentiation |
| hsa-miR-374c-3p | 947 | 1968 | muscle | | myogenic |
| | | | (myoblasts) | | differentiation |
| hsa-miR-374c-5p | 948 | 1969 | muscle | | myogenic |
| | | | (myoblasts) | | differentiation |
| hsa-miR-375 | 949 | 1970 | pancreas (islet) | | |
| hsa-miR-376a-2-5p | 950 | 1971 | regulatory miRs | | |
| | | | for hematopoietic | | |
| | | | cells | | |
| | | | (erythroid, platelet, | | |
| | | | lympho) | | |
| hsa-miR-376a-3p | 951 | 1972 | regulatory miRs | | |
| | | | for hematopoietic | | |
| | | | cells | | |
| | | | (erythroid, platelet, | | |
| | | | lympho) | | |
| hsa-miR-376a-5p | 952 | 1973 | regulatory miRs | | |
| | | | for hematopoietic | | |
| | | | cells | | |
| | | | (erythroid, platelet, | | |
| | | | lympho) | | |
| hsa-miR-376b-3p | 953 | 1974 | blood | various cancer | autophagy |
| | | | | cells | |
| hsa-miR-376b-5p | 954 | 1975 | blood | various cancer | autophagy |
| | | | | cells | |
| hsa-miR-376c-3p | 955 | 1976 | trophoblast | various cancer | cell proliferatio |
| | | | | cells | |
| hsa-miR-376c-5p | 956 | 1977 | trophoblast | various cancer | cell proliferatio |
| | | | | cells | |
| hsa-miR-377-3p | 957 | 1978 | hematopoietic | | |
| | | | cells | | |
| hsa-miR-377-5p | 958 | 1979 | hematopoietic | | |
| | | | cells | | |
| hsa-miR-378a-3p | 959 | 1980 | ovary, lipid | | |
| | | | metabolism | | |
| hsa-miR-378a-5p | 960 | 1981 | ovary, placenta/ | | |
| | | | trophoblast, lipid | | |
| | | | metabolism | | |
| hsa-miR-378b | 961 | 1982 | lipid metabolism | | |
| hsa-miR-378c | 962 | 1983 | lipid metabolism | | |
| hsa-miR-378d | 963 | 1984 | lipid metabolism | | |
| hsa-miR-378e | 964 | 1985 | lipid metabolism | | |
| hsa-miR-378f | 965 | 1986 | lipid metabolism | | |
| hsa-miR-378g | 966 | 1987 | lipid metabolism | | |
| hsa-miR-378h | 967 | 1988 | lipid metabolism | | |
| hsa-miR-378i | 968 | 1989 | lipid metabolism | | |
| hsa-miR-378j | 969 | 1990 | lipid metabolism | | |
| hsa-miR-379-3p | 970 | 1991 | | various cancers | |
| | | | | (breast, | |
| | | | | hepatocytes, | |
| | | | | colon) | |
| hsa-miR-379-5p | 971 | 1992 | | various cancers | |
| | | | | (breast, | |
| | | | | hepatocytes, | |
| | | | | colon) | |
| hsa-miR-380-3p | 972 | 1993 | brain | neuroblastoma | |
| hsa-miR-380-5p | 973 | 1994 | brain, embryonic | neuroblastoma | |
| | | | stem cells | | |
| hsa-miR-381-3p | 974 | 1995 | chondrogenesis, | | |
| | | | lung, brain | | |
| hsa-miR-381-5p | 975 | 1996 | chondrogenesis, | | |
| | | | lung, brain | | |
| hsa-miR-382-3p | 976 | 1997 | renal epithelial | | |
| | | | cells | | |
| hsa-miR-382-5p | 977 | 1998 | renal epithelial | | |
| | | | cells | | |
| hsa-miR-383 | 978 | 1999 | testes, brain | | |
| | | | (medulla) | | |
| hsa-miR-384 | 979 | 2000 | epithelial cells | | |
| hsa-miR-3907 | 980 | 2001 | discovered in | | |
| | | | female | | |
| | | | reproductive tract | | |
| hsa-miR-3908 | 981 | 2002 | discovered in | | |
| | | | female | | |
| | | | reproductive tract | | |
| hsa-miR-3909 | 982 | 2003 | discovered in | | |
| | | | female | | |
| | | | reproductive tract | | |
| hsa-miR-3910 | 983 | 2004 | discovered in | | |
| | | | female | | |
| | | | reproductive tract | | |
| hsa-miR-3911 | 984 | 2005 | discovered in | | |
| | | | breast tumor and | | |
| | | | female | | |
| | | | reproductive tract | | |
| hsa-miR-3912 | 985 | 2006 | discovered in | | |
| | | | female | | |
| | | | reproductive tract | | |
| hsa-miR-3913-3p | 986 | 2007 | discovered in | | |
| | | | breast tumor and | | |
| | | | female | | |
| | | | reproductive tract | | |
| hsa-miR-3913-5p | 987 | 2008 | discovered in | | |
| | | | breast tumor and | | |
| | | | female | | |
| | | | reproductive tract | | |
| hsa-miR-3914 | 988 | 2009 | discovered in | | |
| | | | breast tumor and | | |
| | | | female | | |
| | | | reproductive tract | | |
| hsa-miR-3915 | 989 | 2010 | discovered in | | |
| | | | female | | |
| | | | reproductive tract | | |
| hsa-miR-3916 | 990 | 2011 | discovered in | | |
| | | | female | | |
| | | | reproductive tract | | |
| hsa-miR-3917 | 991 | 2012 | discovered in | | |
| | | | female | | |
| | | | reproductive tract | | |
| hsa-miR-3918 | 992 | 2013 | discovered in | | |
| | | | female | | |
| | | | reproductive tract | | |
| hsa-miR-3919 | 993 | 2014 | discovered in | | |
| | | | female | | |
| | | | reproductive tract | | |
| hsa-miR-3920 | 994 | 2015 | discovered in | | |
| | | | female | | |
| | | | reproductive tract | | |
| hsa-miR-3921 | 995 | 2016 | discovered in | | |
| | | | female | | |
| | | | reproductive tract | | |
| hsa-miR-3922-3p | 996 | 2017 | discovered in | | |
| | | | breast tumor and | | |
| | | | female | | |
| | | | reproductive tract | | |
| hsa-miR-3922-5p | 997 | 2018 | discovered in | | |
| | | | breast tumor and | | |
| | | | female | | |
| | | | reproductive tract | | |
| hsa-miR-3923 | 998 | 2019 | discovered in | | |
| | | | female | | |
| | | | reproductive tract | | |
| hsa-miR-3924 | 999 | 2020 | discovered in | | |
| | | | female | | |
| | | | reproductive tract | | |
| hsa-miR-3925-3p | 1000 | 2021 | discovered in | | |
| | | | breast tumor and | | |
| | | | female | | |
| | | | reproductive tract | | |
| hsa-miR-3925-5p | 1001 | 2022 | discovered in | | |
| | | | breast tumor and | | |
| | | | female | | |
| | | | reproductive tract | | |
| hsa-miR-3926 | 1002 | 2023 | discovered in | | |
| | | | female | | |
| | | | reproductive tract | | |
| hsa-miR-3927-3p | 1003 | 2024 | discovered in | | |
| | | | female | | |
| | | | reproductive tract | | |
| | | | and psoriasis | | |
| hsa-miR-3927-5p | 1004 | 2025 | discovered in | | |
| | | | female | | |
| | | | reproductive tract | | |
| | | | and psoriasis | | |
| hsa-miR-3928 | 1005 | 2026 | discovered in | | |
| | | | female | | |
| | | | reproductive tract | | |
| hsa-miR-3929 | 1006 | 2027 | discovered in | | |
| | | | female | | |
| | | | reproductive tract | | |
| hsa-miR-3934-3p | 1007 | 2028 | discovered in | | |
| | | | abnormal skin | | |
| | | | (psoriasis) | | |
| hsa-miR-3934-5p | 1008 | 2029 | discovered in | | |
| | | | abnormal skin | | |
| | | | (psoriasis) | | |
| hsa-miR-3935 | 1009 | 2030 | | | |
| hsa-miR-3936 | 1010 | 2031 | discovered in | | |
| | | | breast tumor and | | |
| | | | lymphoblastic | | |
| | | | leukaemia | | |
| hsa-miR-3937 | 1011 | 2032 | | | |
| hsa-miR-3938 | 1012 | 2033 | | | |
| hsa-miR-3939 | 1013 | 2034 | | | |
| hsa-miR-3940-3p | 1014 | 2035 | discovered in | | |
| | | | breast tumor | | |
| hsa-miR-3940-5p | 1015 | 2036 | discovered in | | |
| | | | breast tumor | | |
| hsa-miR-3941 | 1016 | 2037 | | | |
| hsa-miR-3942-3p | 1017 | 2038 | discovered in | | |
| | | | breast tumor and | | |
| | | | lymphoblastic | | |
| | | | leukaemia | | |
| hsa-miR-3942-5p | 1018 | 2039 | discovered in | | |
| | | | breast tumor and | | |
| | | | lymphoblastic | | |
| | | | leukaemia | | |
| hsa-miR-3943 | 1019 | 2040 | | | |
| hsa-miR-3944-3p | 1020 | 2041 | discovered in | | |
| | | | breast tumor | | |
| hsa-miR-3944-5p | 1021 | 2042 | discovered in | | |
| | | | breast tumor | | |
| hsa-miR-3945 | 1022 | 2043 | | | |
| hsa-miR-3960 | 1023 | 2044 | osteoblast | | |
| hsa-miR-3972 | 1024 | 2045 | discovered in | | |
| | | | Acute Myeloid | | |
| | | | Leukaemia | | |
| hsa-miR-3973 | 1025 | 2046 | discovered in | | |
| | | | Acute Myeloid | | |
| | | | Leukaemia | | |
| hsa-miR-3974 | 1026 | 2047 | discovered in | | |
| | | | Acute Myeloid | | |
| | | | Leukaemia | | |
| hsa-miR-3975 | 1027 | 2048 | discovered in | | |
| | | | Acute Myeloid | | |
| | | | Leukaemia | | |
| hsa-miR-3976 | 1028 | 2049 | discovered in | | |
| | | | Acute Myeloid | | |
| | | | Leukaemia | | |
| hsa-miR-3977 | 1029 | 2050 | discovered in | | |
| | | | Acute Myeloid | | |
| | | | Leukaemia | | |
| hsa-miR-3978 | 1030 | 2051 | discovered in | | |
| | | | Acute Myeloid | | |
| | | | Leukaemia | | |
| hsa-miR-409-3p | 1031 | 2052 | | gastric cancer | |
| hsa-miR-409-5p | 1032 | 2053 | | gastric cancer | |
| hsa-miR-410 | 1033 | 2054 | brain | glioma | |
| hsa-miR-411-3p | 1034 | 2055 | | Glioblastoma | |
| | | | | others | |
| hsa-miR-411-5p | 1035 | 2056 | | Glioblastoma | |
| | | | | others | |
| hsa-miR-412 | 1036 | 2057 | | upregulated in | |
| | | | | lung cancer | |
| hsa-miR-421 | 1037 | 2058 | endothelial cells | gastric cancer, | |
| | | | | HCC | |
| hsa-miR-422a | 1038 | 2059 | circulating | | |
| | | | microRNA (in | | |
| | | | plasma) | | |
| hsa-miR-423-3p | 1039 | 2060 | embryonic stem | | |
| | | | cells | | |
| hsa-miR-423-5p | 1040 | 2061 | heart, embryonic | | |
| | | | stem cells | | |
| hsa-miR-424-3p | 1041 | 2062 | endothelial cells | various | pro-angiogenic |
| | | | | cancers(e.g B- | |
| | | | | lieage ALL), | |
| | | | | cardiac diseases | |
| hsa-miR-424-5p | 1042 | 2063 | endothelial cells | various | pro-angiogenic |
| | | | | cancers(e.g B- | |
| | | | | lieage ALL), | |
| | | | | cardiac diseases | |
| hsa-miR-4251 | 1043 | 2064 | discovered in | | |
| | | | embryonic stem | | |
| | | | cells and neural | | |
| | | | precusors | | |
| hsa-miR-4252 | 1044 | 2065 | discovered in | | |
| | | | embryonic stem | | |
| | | | cells and neural | | |
| | | | precusors | | |
| hsa-miR-4253 | 1045 | 2066 | discovered in | | |
| | | | embryonic stem | | |
| | | | cells and neural | | |
| | | | precusors | | |
| hsa-miR-425-3p | 1046 | 2067 | brain | ovarian cancer, | |
| | | | | brain tumor | |
| hsa-miR-4254 | 1047 | 2068 | discovered in | | |
| | | | embryonic stem | | |
| | | | cells and neural | | |
| | | | precusors | | |
| hsa-miR-4255 | 1048 | 2069 | discovered in | | |
| | | | embryonic stem | | |
| | | | cells and neural | | |
| | | | precusors | | |
| hsa-miR-425-5p | 1049 | 2070 | brain | B-lieage ALL, | |
| | | | | brain tumor | |
| hsa-miR-4256 | 1050 | 2071 | discovered in | | |
| | | | embryonic stem | | |
| | | | cells and neural | | |
| | | | precusors | | |
| hsa-miR-4257 | 1051 | 2072 | discovered in | | |
| | | | embryonic stem | | |
| | | | cells and neural | | |
| | | | precusors | | |
| hsa-miR-4258 | 1052 | 2073 | discovered in | | |
| | | | embryonic stem | | |
| | | | cells and neural | | |
| | | | precusors | | |
| hsa-miR-4259 | 1053 | 2074 | discovered in | | |
| | | | embryonic stem | | |
| | | | cells and neural | | |
| | | | precusors | | |
| hsa-miR-4260 | 1054 | 2075 | discovered in | | |
| | | | embryonic stem | | |
| | | | cells and neural | | |
| | | | precusors | | |
| hsa-miR-4261 | 1055 | 2076 | discovered in | | |
| | | | embryonic stem | | |
| | | | cells and neural | | |
| | | | precusors | | |
| hsa-miR-4262 | 1056 | 2077 | discovered in | | |
| | | | embryonic stem | | |
| | | | cells and neural | | |
| | | | precusors | | |
| hsa-miR-4263 | 1057 | 2078 | discovered in | | |
| | | | embryonic stem | | |
| | | | cells and neural | | |
| | | | precusors | | |
| hsa-miR-4264 | 1058 | 2079 | discovered in | | |
| | | | embryonic stem | | |
| | | | cells and neural | | |
| | | | precusors | | |
| hsa-miR-4265 | 1059 | 2080 | discovered in | | |
| | | | embryonic stem | | |
| | | | cells and neural | | |
| | | | precusors | | |
| hsa-miR-4266 | 1060 | 2081 | discovered in | | |
| | | | embryonic stem | | |
| | | | cells and neural | | |
| | | | precusors | | |
| hsa-miR-4267 | 1061 | 2082 | discovered in | | |
| | | | embryonic stem | | |
| | | | cells and neural | | |
| | | | precusors | | |
| hsa-miR-4268 | 1062 | 2083 | discovered in | | |
| | | | embryonic stem | | |
| | | | cells and neural | | |
| | | | precusors | | |
| hsa-miR-4269 | 1063 | 2084 | discovered in | | |
| | | | embryonic stem | | |
| | | | cells and neural | | |
| | | | precusors | | |
| hsa-miR-4270 | 1064 | 2085 | discovered in | | |
| | | | embryonic stem | | |
| | | | cells and neural | | |
| | | | precusors | | |
| hsa-miR-4271 | 1065 | 2086 | discovered in | | |
| | | | embryonic stem | | |
| | | | cells and neural | | |
| | | | precusors | | |
| hsa-miR-4272 | 1066 | 2087 | discovered in | | |
| | | | embryonic stem | | |
| | | | cells and neural | | |
| | | | precusors | | |
| hsa-miR-4273 | 1067 | 2088 | | | |
| hsa-miR-4274 | 1068 | 2089 | discovered in | | |
| | | | embryonic stem | | |
| | | | cells and neural | | |
| | | | precusors | | |
| hsa-miR-4275 | 1069 | 2090 | discovered in | | |
| | | | embryonic stem | | |
| | | | cells and neural | | |
| | | | precusors | | |
| hsa-miR-4276 | 1070 | 2091 | discovered in | | |
| | | | embryonic stem | | |
| | | | cells and neural | | |
| | | | precusors | | |
| hsa-miR-4277 | 1071 | 2092 | discovered in | | |
| | | | embryonic stem | | |
| | | | cells and neural | | |
| | | | precusors | | |
| hsa-miR-4278 | 1072 | 2093 | discovered in | | |
| | | | embryonic stem | | |
| | | | cells and neural | | |
| | | | precusors | | |
| hsa-miR-4279 | 1073 | 2094 | discovered in | | |
| | | | embryonic stem | | |
| | | | cells and neural | | |
| | | | precusors | | |
| hsa-miR-4280 | 1074 | 2095 | discovered in | | |
| | | | embryonic stem | | |
| | | | cells and neural | | |
| | | | precusors | | |
| hsa-miR-4281 | 1075 | 2096 | discovered in | | |
| | | | embryonic stem | | |
| | | | cells and neural | | |
| | | | precusors | | |
| hsa-miR-4282 | 1076 | 2097 | discovered in | | |
| | | | embryonic stem | | |
| | | | cells and neural | | |
| | | | precusors | | |
| hsa-miR-4283 | 1077 | 2098 | discovered in | | |
| | | | embryonic stem | | |
| | | | cells and neural | | |
| | | | precusors | | |
| hsa-miR-4284 | 1078 | 2099 | discovered in | | |
| | | | embryonic stem | | |
| | | | cells and neural | | |
| | | | precusors | | |
| hsa-miR-4285 | 1079 | 2100 | discovered in | | |
| | | | embryonic stem | | |
| | | | cells and neural | | |
| | | | precusors | | |
| hsa-miR-4286 | 1080 | 2101 | discovered in | | |
| | | | embryonic stem | | |
| | | | cells and neural | | |
| | | | precusors | | |
| hsa-miR-4287 | 1081 | 2102 | discovered in | | |
| | | | embryonic stem | | |
| | | | cells and neural | | |
| | | | precusors | | |
| hsa-miR-4288 | 1082 | 2103 | discovered in | | |
| | | | embryonic stem | | |
| | | | cells and neural | | |
| | | | precusors | | |
| hsa-miR-4289 | 1083 | 2104 | discovered in | | |
| | | | embryonic stem | | |
| | | | cells and neural | | |
| | | | precusors | | |
| hsa-miR-429 | 1084 | 2105 | Epithelial cells | various cancers | |
| | | | | (colorectal, | |
| | | | | endometrial, | |
| | | | | gastric, ovarian | |
| | | | | etc) | |
| hsa-miR-4290 | 1085 | 2106 | discovered in | | |
| | | | embryonic stem | | |
| | | | cells and neural | | |
| | | | precusors | | |
| hsa-miR-4291 | 1086 | 2107 | discovered in | | |
| | | | embryonic stem | | |
| | | | cells and neural | | |
| | | | precusors | | |
| hsa-miR-4292 | 1087 | 2108 | discovered in | | |
| | | | embryonic stem | | |
| | | | cells and neural | | |
| | | | precusors | | |
| hsa-miR-4293 | 1088 | 2109 | discovered in | | |
| | | | embryonic stem | | |
| | | | cells and neural | | |
| | | | precusors | | |
| hsa-miR-4294 | 1089 | 2110 | discovered in | | |
| | | | embryonic stem | | |
| | | | cells and neural | | |
| | | | precusors | | |
| hsa-miR-4295 | 1090 | 2111 | discovered in | | |
| | | | embryonic stem | | |
| | | | cells and neural | | |
| | | | precusors | | |
| hsa-miR-4296 | 1091 | 2112 | discovered in | | |
| | | | embryonic stem | | |
| | | | cells and neural | | |
| | | | precusors | | |
| hsa-miR-4297 | 1092 | 2113 | discovered in | | |
| | | | embryonic stem | | |
| | | | cells and neural | | |
| | | | precusors | | |
| hsa-miR-4298 | 1093 | 2114 | discovered in | | |
| | | | embryonic stem | | |
| | | | cells and neural | | |
| | | | precusors | | |
| hsa-miR-4299 | 1094 | 2115 | discovered in | | |
| | | | embryonic stem | | |
| | | | cells and neural | | |
| | | | precusors | | |
| hsa-miR-4300 | 1095 | 2116 | discovered in | | |
| | | | embryonic stem | | |
| | | | cells and neural | | |
| | | | precusors | | |
| hsa-miR-4301 | 1096 | 2117 | discovered in | | |
| | | | embryonic stem | | |
| | | | cells and neural | | |
| | | | precusors | | |
| hsa-miR-4302 | 1097 | 2118 | discovered in | | |
| | | | embryonic stem | | |
| | | | cells and neural | | |
| | | | precusors | | |
| hsa-miR-4303 | 1098 | 2119 | discovered in | | |
| | | | embryonic stem | | |
| | | | cells and neural | | |
| | | | precusors | | |
| hsa-miR-4304 | 1099 | 2120 | discovered in | | |
| | | | embryonic stem | | |
| | | | cells and neural | | |
| | | | precusors | | |
| hsa-miR-4305 | 1100 | 2121 | discovered in | | |
| | | | embryonic stem | | |
| | | | cells and neural | | |
| | | | precusors | | |
| hsa-miR-4306 | 1101 | 2122 | discovered in | | |
| | | | embryonic stem | | |
| | | | cells and neural | | |
| | | | precusors | | |
| hsa-miR-4307 | 1102 | 2123 | discovered in | | |
| | | | embryonic stem | | |
| | | | cells and neural | | |
| | | | precusors | | |
| hsa-miR-4308 | 1103 | 2124 | discovered in | | |
| | | | embryonic stem | | |
| | | | cells and neural | | |
| | | | precusors | | |
| hsa-miR-4309 | 1104 | 2125 | discovered in | | |
| | | | embryonic stem | | |
| | | | cells and neural | | |
| | | | precusors | | |
| hsa-miR-4310 | 1105 | 2126 | discovered in | | |
| | | | embryonic stem | | |
| | | | cells and neural | | |
| | | | precusors | | |
| hsa-miR-4311 | 1106 | 2127 | discovered in | | |
| | | | embryonic stem | | |
| | | | cells and neural | | |
| | | | precusors | | |
| hsa-miR-4312 | 1107 | 2128 | discovered in | | |
| | | | embryonic stem | | |
| | | | cells and neural | | |
| | | | precusors | | |
| hsa-miR-4313 | 1108 | 2129 | discovered in | | |
| | | | embryonic stem | | |
| | | | cells and neural | | |
| | | | precusors | | |
| hsa-miR-431-3p | 1109 | 2130 | | Cancers (follicular | |
| | | | | lymphoma) | |
| hsa-miR-4314 | 1110 | 2131 | discovered in | | |
| | | | embryonic stem | | |
| | | | cells and neural | | |
| | | | precusors | | |
| hsa-miR-4315 | 1111 | 2132 | discovered in | | |
| | | | embryonic stem | | |
| | | | cells and neural | | |
| | | | precusors | | |
| hsa-miR-431-5p | 1112 | 2133 | | Cancers (follicular | |
| | | | | lymphoma) | |
| hsa-miR-4316 | 1113 | 2134 | discovered in | | |
| | | | embryonic stem | | |
| | | | cells and neural | | |
| | | | precusors | | |
| hsa-miR-4317 | 1114 | 2135 | discovered in | | |
| | | | embryonic stem | | |
| | | | cells and neural | | |
| | | | precusors | | |
| hsa-miR-4318 | 1115 | 2136 | discovered in | | |
| | | | embryonic stem | | |
| | | | cells and neural | | |
| | | | precusors | | |
| hsa-miR-4319 | 1116 | 2137 | discovered in | | |
| | | | embryonic stem | | |
| | | | cells and neural | | |
| | | | precusors | | |
| hsa-miR-4320 | 1117 | 2138 | discovered in | | |
| | | | embryonic stem | | |
| | | | cells and neural | | |
| | | | precusors | | |
| hsa-miR-4321 | 1118 | 2139 | discovered in | | |
| | | | embryonic stem | | |
| | | | cells and neural | | |
| | | | precusors | | |
| hsa-miR-4322 | 1119 | 2140 | discovered in | | |
| | | | embryonic stem | | |
| | | | cells and neural | | |
| | | | precusors | | |
| hsa-miR-4323 | 1120 | 2141 | discovered in | | |
| | | | embryonic stem | | |
| | | | cells and neural | | |
| | | | precusors | | |
| hsa-miR-432-3p | 1121 | 2142 | myoblast | | myogenic |
| | | | | | differentiation |
| hsa-miR-4324 | 1122 | 2143 | discovered in | | |
| | | | embryonic stem | | |
| | | | cells and neural | | |
| | | | precusors | | |
| hsa-miR-4325 | 1123 | 2144 | discovered in | | |
| | | | embryonic stem | | |
| | | | cells and neural | | |
| | | | precusors | | |
| hsa-miR-432-5p | 1124 | 2145 | myoblast | | myogenic |
| | | | | | differentiation |
| hsa-miR-4326 | 1125 | 2146 | discovered in | | |
| | | | embryonic stem | | |
| | | | cells and neural | | |
| | | | precusors | | |
| hsa-miR-4327 | 1126 | 2147 | discovered in | | |
| | | | embryonic stem | | |
| | | | cells and neural | | |
| | | | precusors | | |
| hsa-miR-4328 | 1127 | 2148 | discovered in | | |
| | | | embryonic stem | | |
| | | | cells and neural | | |
| | | | precusors | | |
| hsa-miR-4329 | 1128 | 2149 | discovered in | | |
| | | | embryonic stem | | |
| | | | cells and neural | | |
| | | | precusors | | |
| hsa-miR-433 | 1129 | 2150 | | various diseases | |
| | | | | (cancer, | |
| | | | | Parkinson's, | |
| | | | | Chondrodysplasia) | |
| hsa-miR-4330 | 1130 | 2151 | discovered in | | |
| | | | embryonic stem | | |
| | | | cells and neural | | |
| | | | precusors | | |
| hsa-miR-4417 | 1131 | 2152 | discovered in B | | |
| | | | cells | | |
| hsa-miR-4418 | 1132 | 2153 | discovered in B | | |
| | | | cells | | |
| hsa-miR-4419a | 1133 | 2154 | discovered in B | | |
| | | | cells | | |
| hsa-miR-4419b | 1134 | 2155 | discovered in B | | |
| | | | cells | | |
| hsa-miR-4420 | 1135 | 2156 | discovered in B | | |
| | | | cells | | |
| hsa-miR-4421 | 1136 | 2157 | discovered in B | | |
| | | | cells | | |
| hsa-miR-4422 | 1137 | 2158 | discovered in | | |
| | | | breast tumor and | | |
| | | | B cells | | |
| hsa-miR-4423-3p | 1138 | 2159 | discovered in | | |
| | | | breast tumor, B | | |
| | | | cells and | | |
| | | | skin(psoriasis) | | |
| hsa-miR-4423-5p | 1139 | 2160 | discovered in | | |
| | | | breast tumor B | | |
| | | | cells and | | |
| | | | skin(psoriasis) | | |
| hsa-miR-4424 | 1140 | 2161 | discovered in B | | |
| | | | cells | | |
| hsa-miR-4425 | 1141 | 2162 | discovered in B | | |
| | | | cells | | |
| hsa-miR-4426 | 1142 | 2163 | discovered in B | | |
| | | | cells | | |
| hsa-miR-4427 | 1143 | 2164 | discovered in B | | |
| | | | cells | | |
| hsa-miR-4428 | 1144 | 2165 | discovered in B | | |
| | | | cells | | |
| hsa-miR-4429 | 1145 | 2166 | discovered in B | | |
| | | | cells | | |
| hsa-miR-4430 | 1146 | 2167 | discovered in B | | |
| | | | cells | | |
| hsa-miR-4431 | 1147 | 2168 | discovered in B | | |
| | | | cells | | |
| hsa-miR-4432 | 1148 | 2169 | discovered in B | | |
| | | | cells | | |
| hsa-miR-4433-3p | 1149 | 2170 | discovered in B | | |
| | | | cells | | |
| hsa-miR-4433-5p | 1150 | 2171 | discovered in B | | |
| | | | cells | | |
| hsa-miR-4434 | 1151 | 2172 | discovered in B | | |
| | | | cells | | |
| hsa-miR-4435 | 1152 | 2173 | discovered in B | | |
| | | | cells | | |
| hsa-miR-4436a | 1153 | 2174 | discovered in | | |
| | | | breast tumor and B | | |
| | | | cells | | |
| hsa-miR-4436b-3p | 1154 | 2175 | discovered in | | |
| | | | breast tumor | | |
| hsa-miR-4436b-5p | 1155 | 2176 | discovered in | | |
| | | | breast tumor | | |
| hsa-miR-4437 | 1156 | 2177 | discovered in B | | |
| | | | cells | | |
| hsa-miR-4438 | 1157 | 2178 | discovered in B | | |
| | | | cells | | |
| hsa-miR-4439 | 1158 | 2179 | discovered in B | | |
| | | | cells | | |
| hsa-miR-4440 | 1159 | 2180 | discovered in B | | |
| | | | cells | | |
| hsa-miR-4441 | 1160 | 2181 | discovered in B | | |
| | | | cells | | |
| hsa-miR-4442 | 1161 | 2182 | discovered in B | | |
| | | | cells | | |
| hsa-miR-4443 | 1162 | 2183 | discovered in B | | |
| | | | cells | | |
| hsa-miR-4444 | 1163 | 2184 | discovered in B | | |
| | | | cells | | |
| hsa-miR-4445-3p | 1164 | 2185 | discovered in B | | |
| | | | cells | | |
| hsa-miR-4445-5p | 1165 | 2186 | discovered in B | | |
| | | | cells | | |
| hsa-miR-4446-3p | 1166 | 2187 | discovered in | | |
| | | | breast tumor and B | | |
| | | | cells | | |
| hsa-miR-4446-5p | 1167 | 2188 | discovered in | | |
| | | | breast tumor and B | | |
| | | | cells | | |
| hsa-miR-4447 | 1168 | 2189 | discovered in B | | |
| | | | cells | | |
| hsa-miR-4448 | 1169 | 2190 | discovered in B | | |
| | | | cells | | |
| hsa-miR-4449 | 1170 | 2191 | discovered in B | | |
| | | | cells | | |
| hsa-miR-4450 | 1171 | 2192 | discovered in B | | |
| | | | cells | | |
| hsa-miR-4451 | 1172 | 2193 | discovered in B | | |
| | | | cells | | |
| hsa-miR-4452 | 1173 | 2194 | discovered in B | | |
| | | | cells | | |
| hsa-miR-4453 | 1174 | 2195 | discovered in B | | |
| | | | cells | | |
| hsa-miR-4454 | 1175 | 2196 | discovered in B | | |
| | | | cells | | |
| hsa-miR-4455 | 1176 | 2197 | discovered in B | | |
| | | | cells | | |
| hsa-miR-4456 | 1177 | 2198 | discovered in B | | |
| | | | cells | | |
| hsa-miR-4457 | 1178 | 2199 | discovered in B | | |
| | | | cells | | |
| hsa-miR-4458 | 1179 | 2200 | discovered in B | | |
| | | | cells | | |
| hsa-miR-4459 | 1180 | 2201 | discovered in B | | |
| | | | cells | | |
| hsa-miR-4460 | 1181 | 2202 | discovered in B | | |
| | | | cells | | |
| hsa-miR-4461 | 1182 | 2203 | discovered in B | | |
| | | | cells | | |
| hsa-miR-4462 | 1183 | 2204 | discovered in B | | |
| | | | cells | | |
| hsa-miR-4463 | 1184 | 2205 | discovered in B | | |
| | | | cells | | |
| hsa-miR-4464 | 1185 | 2206 | discovered in B | | |
| | | | cells | | |
| hsa-miR-4465 | 1186 | 2207 | discovered in B | | |
| | | | cells | | |
| hsa-miR-4466 | 1187 | 2208 | discovered in B | | |
| | | | cells | | |
| hsa-miR-4467 | 1188 | 2209 | discovered in | | |
| | | | breast tumor and B | | |
| | | | cells | | |
| hsa-miR-4468 | 1189 | 2210 | discovered in B | | |
| | | | cells | | |
| hsa-miR-4469 | 1190 | 2211 | discovered in | | |
| | | | breast tumor and B | | |
| | | | cells | | |
| hsa-miR-4470 | 1191 | 2212 | discovered in B | | |
| | | | cells | | |
| hsa-miR-4471 | 2213 | 3234 | discovered in | | |
| | | | breast tumor and B | | |
| | | | cells | | |
| hsa-miR-4472 | 2214 | 3235 | discovered in B | | |
| | | | cells | | |
| hsa-miR-4473 | 2215 | 3236 | discovered in B | | |
| | | | cells | | |
| hsa-miR-4474-3p | 2216 | 3237 | discovered in | | |
| | | | breast tumor, | | |
| | | | lymphoblastic | | |
| | | | leukaemia and B | | |
| | | | cells | | |
| hsa-miR-4474-5p | 2217 | 3238 | discovered in | | |
| | | | breast tumor, | | |
| | | | lymphoblastic | | |
| | | | leukaemia and B | | |
| | | | cells | | |
| hsa-miR-4475 | 2218 | 3239 | discovered in B | | |
| | | | cells | | |
| hsa-miR-4476 | 2219 | 3240 | discovered in B | | |
| | | | cells | | |
| hsa-miR-4477a | 2220 | 3241 | discovered in B | | |
| | | | cells | | |
| hsa-miR-4477b | 2221 | 3242 | discovered in B | | |
| | | | cells | | |
| hsa-miR-4478 | 2222 | 3243 | discovered in B | | |
| | | | cells | | |
| hsa-miR-4479 | 2223 | 3244 | discovered in B | | |
| | | | cells | | |
| hsa-miR-448 | 2224 | 3245 | liver(hepatocytes) | HCC | |
| hsa-miR-4480 | 2225 | 3246 | discovered in B | | |
| | | | cells | | |
| hsa-miR-4481 | 2226 | 3247 | discovered in B | | |
| | | | cells | | |
| hsa-miR-4482-3p | 2227 | 3248 | discovered in B | | |
| | | | cells | | |
| hsa-miR-4482-5p | 2228 | 3249 | discovered in B | | |
| | | | cells | | |
| hsa-miR-4483 | 2229 | 3250 | discovered in B | | |
| | | | cells | | |
| hsa-miR-4484 | 2230 | 3251 | discovered in B | | |
| | | | cells | | |
| hsa-miR-4485 | 2231 | 3252 | discovered in B | | |
| | | | cells | | |
| hsa-miR-4486 | 2232 | 3253 | discovered in B | | |
| | | | cells | | |
| hsa-miR-4487 | 2233 | 3254 | discovered in B | | |
| | | | cells | | |
| hsa-miR-4488 | 2234 | 3255 | discovered in B | | |
| | | | cells | | |
| hsa-miR-4489 | 2235 | 3256 | discovered in | | |
| | | | breast tumor and B | | |
| | | | cells | | |
| hsa-miR-4490 | 2236 | 3257 | discovered in B | | |
| | | | cells | | |
| hsa-miR-4491 | 2237 | 3258 | discovered in B | | |
| | | | cells | | |
| hsa-miR-4492 | 2238 | 3259 | discovered in B | | |
| | | | cells | | |
| hsa-miR-4493 | 2239 | 3260 | discovered in B | | |
| | | | cells | | |
| hsa-miR-4494 | 2240 | 3261 | discovered in B | | |
| | | | cells | | |
| hsa-miR-4495 | 2241 | 3262 | discovered in B | | |
| | | | cells | | |
| hsa-miR-4496 | 2242 | 3263 | discovered in B | | |
| | | | cells | | |
| hsa-miR-4497 | 2243 | 3264 | discovered in B | | |
| | | | cells | | |
| hsa-miR-4498 | 2244 | 3265 | discovered in B | | |
| | | | cells | | |
| hsa-miR-4499 | 2245 | 3266 | discovered in B | | |
| | | | cells | | |
| hsa-miR-449a | 2246 | 3267 | chondrocytes, ciliated | lung, colonic, | cell cycle |
| | | | epithelial cells | ovarian cancer | progression and |
| | | | | | proliferation |
| hsa-miR-449b-3p | 2247 | 3268 | ciliated epithelial | various cancer | cell cycle |
| | | | cells, other tissues | cells | progression and |
| | | | | | proliferation |
| hsa-miR-449b-5p | 2248 | 3269 | ciliated epithelial | various cancer | cell cycle |
| | | | cells, other tissues | cells | progression and |
| | | | | | proliferation |
| hsa-miR-449c-3p | 2249 | 3270 | | epithelial ovarian | |
| | | | | cancer cells | |
| hsa-miR-449c-5p | 2250 | 3271 | | epithelial ovarian | |
| | | | | cancer cells | |
| hsa-miR-4500 | 2251 | 3272 | discovered in B | | |
| | | | cells | | |
| hsa-miR-4501 | 2252 | 3273 | discovered in B | | |
| | | | cells | | |
| hsa-miR-4502 | 2253 | 3274 | discovered in B | | |
| | | | cells | | |
| hsa-miR-4503 | 2254 | 3275 | discovered in B | | |
| | | | cells | | |
| hsa-miR-4504 | 2255 | 3276 | discovered in B | | |
| | | | cells | | |
| hsa-miR-4505 | 2256 | 3277 | discovered in B | | |
| | | | cells | | |
| hsa-miR-4506 | 2257 | 3278 | discovered in B | | |
| | | | cells | | |
| hsa-miR-4507 | 2258 | 3279 | discovered in B | | |
| | | | cells | | |
| hsa-miR-4508 | 2259 | 3280 | discovered in B | | |
| | | | cells | | |
| hsa-miR-4509 | 2260 | 3281 | discovered in B | | |
| | | | cells | | |
| hsa-miR-450a-3p | 2261 | 3282 | | | |
| hsa-miR-450a-5p | 2262 | 3283 | | | |
| hsa-miR-450b-3p | 2263 | 3284 | | | |
| hsa-miR-450b-5p | 2264 | 3285 | | | |
| hsa-miR-4510 | 2265 | 3286 | discovered in B | | |
| | | | cells | | |
| hsa-miR-4511 | 2266 | 3287 | discovered in B | | |
| | | | cells | | |
| hsa-miR-4512 | 2267 | 3288 | discovered in B | | |
| | | | cells | | |
| hsa-miR-4513 | 2268 | 3289 | discovered in B | | |
| | | | cells | | |
| hsa-miR-4514 | 2269 | 3290 | discovered in B | | |
| | | | cells | | |
| hsa-miR-4515 | 2270 | 3291 | discovered in B | | |
| | | | cells | | |
| hsa-miR-4516 | 2271 | 3292 | discovered in B | | |
| | | | cells | | |
| hsa-miR-4517 | 2272 | 3293 | discovered in B | | |
| | | | cells | | |
| hsa-miR-4518 | 2273 | 3294 | discovered in B | | |
| | | | cells | | |
| hsa-miR-4519 | 2274 | 3295 | discovered in B | | |
| | | | cells | | |
| hsa-miR-451a | 2275 | 3296 | heart, central | | |
| | | | nevous system, | | |
| | | | epithelial cells | | |
| hsa-miR-451b | 2276 | 3297 | heart, central | | |
| | | | nevous system, | | |
| | | | epithelial cells | | |
| hsa-miR-4520a-3p | 2277 | 3298 | discovered in | | |
| | | | breast tumor and | | |
| | | | B cells, | | |
| | | | skin(psoriasis) | | |
| hsa-miR-4520a-5p | 2278 | 3299 | discovered in | | |
| | | | breast tumor and | | |
| | | | B cells, | | |
| | | | skin(psoriasis) | | |
| hsa-miR-4520b-3p | 2279 | 3300 | discovered in | | |
| | | | breast tumor | | |
| hsa-miR-4520b-5p | 2280 | 3301 | discovered in | | |
| | | | breast tumor | | |
| hsa-miR-4521 | 2281 | 3302 | discovered in B | | |
| | | | cells | | |
| hsa-miR-4522 | 2282 | 3303 | discovered in B | | |
| | | | cells | | |
| hsa-miR-4523 | 2283 | 3304 | discovered in B | | |
| | | | cells | | |
| hsa-miR-452-3p | 2284 | 3305 | myoblast | bladder cancer | |
| | | | | and others | |
| hsa-miR-4524a-3p | 2285 | 3306 | discovered in | | |
| | | | breast tumor and | | |
| | | | B cells, | | |
| | | | skin(psoriasis) | | |
| hsa-miR-4524a-5p | 2286 | 3307 | discovered in | | |
| | | | breast tumor and | | |
| | | | B cells, | | |
| | | | skin(psoriasis) | | |
| hsa-miR-4524b-3p | 2287 | 3308 | discovered in | | |
| | | | breast tumor and | | |
| | | | B cells, | | |
| | | | skin(psoriasis) | | |
| hsa-miR-4524b-5p | 2288 | 3309 | discovered in | | |
| | | | breast tumor and | | |
| | | | B cells, | | |
| | | | skin(psoriasis) | | |
| hsa-miR-4525 | 2289 | 3310 | discovered in B | | |
| | | | cells | | |
| hsa-miR-452-5p | 2290 | 3311 | myoblast | bladder cancer | |
| | | | | and others | |
| hsa-miR-4526 | 2291 | 3312 | discovered in | | |
| | | | breast tumor and | | |
| | | | B cells | | |
| hsa-miR-4527 | 2292 | 3313 | discovered in B | | |
| | | | cells | | |
| hsa-miR-4528 | 2293 | 3314 | discovered in B | | |
| | | | cells | | |
| hsa-miR-4529-3p | 2294 | 3315 | discovered in | | |
| | | | breast tumor and | | |
| | | | B cells | | |
| hsa-miR-4529-5p | 2295 | 3316 | discovered in | | |
| | | | breast tumor and | | |
| | | | B cells | | |
| hsa-miR-4530 | 2296 | 3317 | discovered in B | | |
| | | | cells | | |
| hsa-miR-4531 | 2297 | 3318 | discovered in B | | |
| | | | cells | | |
| hsa-miR-4532 | 2298 | 3319 | discovered in B | | |
| | | | cells | | |
| hsa-miR-4533 | 2299 | 3320 | discovered in B | | |
| | | | cells | | |
| hsa-miR-4534 | 2300 | 3321 | discovered in B | | |
| | | | cells | | |
| hsa-miR-4535 | 2301 | 3322 | discovered in B | | |
| | | | cells | | |
| hsa-miR-4536-3p | 2302 | 3323 | discovered in B | | |
| | | | cells | | |
| hsa-miR-4536-5p | 2303 | 3324 | discovered in B | | |
| | | | cells | | |
| hsa-miR-4537 | 2304 | 3325 | discovered in B | | |
| | | | cells | | |
| hsa-miR-4538 | 2305 | 3326 | discovered in B | | |
| | | | cells | | |
| hsa-miR-4539 | 2306 | 3327 | discovered in B | | |
| | | | cells | | |
| hsa-miR-4540 | 2307 | 3328 | discovered in B | | |
| | | | cells | | |
| hsa-miR-454-3p | 2308 | 3329 | embryoid body | | |
| | | | cells, central | | |
| | | | nevous system, | | |
| | | | monocytes | | |
| hsa-miR-454-5p | 2309 | 3330 | embryoid body | | |
| | | | cells, central | | |
| | | | nevous system, | | |
| | | | monocytes | | |
| hsa-miR-455-3p | 2310 | 3331 | | basal cell | |
| | | | | carcinoma, other | |
| | | | | cancers | |
| hsa-miR-455-5p | 2311 | 3332 | | basal cell | |
| | | | | carcinoma, other | |
| | | | | cancers | |
| hsa-miR-4632-3p | 2312 | 3333 | discovred in | | |
| | | | breast tumor | | |
| hsa-miR-4632-5p | 2313 | 3334 | discovered in | | |
| | | | breast tumor | | |
| hsa-miR-4633-3p | 2314 | 3335 | discovered in | | |
| | | | breast tumor | | |
| hsa-miR-4633-5p | 2315 | 3336 | discovered in | | |
| | | | breast tumor | | |
| hsa-miR-4634 | 2316 | 3337 | discovered in | | |
| | | | breast tumor | | |
| hsa-miR-4635 | 2317 | 3338 | discovered in | | |
| | | | breast tumor | | |
| hsa-miR-4636 | 2318 | 3339 | discovered in | | |
| | | | breast tumor | | |
| hsa-miR-4637 | 2319 | 3340 | discovered in | | |
| | | | breast tumor and | | |
| | | | lymphoblastic | | |
| | | | leukaemia | | |
| hsa-miR-4638-3p | 2320 | 3341 | discovered in | | |
| | | | breast tumor | | |
| hsa-miR-4638-5p | 2321 | 3342 | discovered in | | |
| | | | breast tumor | | |
| hsa-miR-4639-3p | 2322 | 3343 | discovered in | | |
| | | | breast tumor | | |
| hsa-miR-4639-5p | 2323 | 3344 | discovered in | | |
| | | | breast tumor | | |
| hsa-miR-4640-3p | 2324 | 3345 | discovered in | | |
| | | | breast tumor | | |
| hsa-miR-4640-5p | 2325 | 3346 | discovered in | | |
| | | | breast tumor | | |
| hsa-miR-4641 | 2326 | 3347 | discovered in | | |
| | | | breast tumor | | |
| hsa-miR-4642 | 2327 | 3348 | discovered in | | |
| | | | breast tumor | | |
| hsa-miR-4643 | 2328 | 3349 | discovered in | | |
| | | | breast tumor | | |
| hsa-miR-4644 | 2329 | 3350 | discovered in | | |
| | | | breast tumor | | |
| hsa-miR-4645-3p | 2330 | 3351 | discovered in | | |
| | | | breast tumor | | |
| hsa-miR-4645-5p | 2331 | 3352 | discovered in | | |
| | | | breast tumor | | |
| hsa-miR-4646-3p | 2332 | 3353 | discovered in | | |
| | | | breast tumor | | |
| hsa-miR-4646-5p | 2333 | 3354 | discovered in | | |
| | | | breast tumor | | |
| hsa-miR-4647 | 2334 | 3355 | discovered in | | |
| | | | breast tumor | | |
| hsa-miR-4648 | 2335 | 3356 | discovered in | | |
| | | | breast tumor | | |
| hsa-miR-4649-3p | 2336 | 3357 | discovered in | | |
| | | | breast tumor | | |
| hsa-miR-4649-5p | 2337 | 3358 | discovered in | | |
| | | | breast tumor | | |
| hsa-miR-4650-3p | 2338 | 3359 | discovered in | | |
| | | | breast tumor | | |
| hsa-miR-4650-5p | 2339 | 3360 | discovered in | | |
| | | | breast tumor | | |
| hsa-miR-4651 | 2340 | 3361 | discovered in | | |
| | | | breast tumor | | |
| hsa-miR-4652-3p | 2341 | 3362 | discovered in | | |
| | | | breast tumor | | |
| hsa-miR-4652-5p | 2342 | 3363 | discovered in | | |
| | | | breast tumor | | |
| hsa-miR-4653-3p | 2343 | 3364 | discovered in | | |
| | | | breast tumor | | |
| hsa-miR-4653-5p | 2344 | 3365 | discovered in | | |
| | | | breast tumor | | |
| hsa-miR-4654 | 2345 | 3366 | discovered in | | |
| | | | breast tumor | | |
| hsa-miR-4655-3p | 2346 | 3367 | discovered in | | |
| | | | breast tumor | | |
| hsa-miR-4655-5p | 2347 | 3368 | discovered in | | |
| | | | breast tumor | | |
| hsa-miR-4656 | 2348 | 3369 | discovered in | | |
| | | | breast tumor | | |
| hsa-miR-4657 | 2349 | 3370 | discovered in | | |
| | | | breast tumor | | |
| hsa-miR-4658 | 2350 | 3371 | discovered in | | |
| | | | breast tumor | | |
| hsa-miR-4659a-3p | 2351 | 3372 | discovered in | | |
| | | | breast tumor | | |
| hsa-miR-4659a-5p | 2352 | 3373 | discovered in | | |
| | | | breast tumor | | |
| hsa-miR-4659b-3p | 2353 | 3374 | discovered in | | |
| | | | breast tumor | | |
| hsa-miR-4659b-5p | 2354 | 3375 | discovered in | | |
| | | | breast tumor | | |
| hsa-miR-466 | 2355 | 3376 | | | |
| hsa-miR-4660 | 2356 | 3377 | discovered in | | |
| | | | breast tumor | | |
| hsa-miR-4661-3p | 2357 | 3378 | discovered in | | |
| | | | breast tumor | | |
| hsa-miR-4661-5p | 2358 | 3379 | discovered in | | |
| | | | breast tumor | | |
| hsa-miR-4662a-3p | 2359 | 3380 | discovered in | | |
| | | | breast tumor, | | |
| | | | psoriasis | | |
| hsa-miR-4662a-5p | 2360 | 3381 | discovered in | | |
| | | | breast tumor, | | |
| | | | psoriasis | | |
| hsa-miR-4662b | 2361 | 3382 | discovered in | | |
| | | | breast tumor | | |
| hsa-miR-4663 | 2362 | 3383 | discovered in | | |
| | | | breast tumor | | |
| hsa-miR-4664-3p | 2363 | 3384 | discovered in | | |
| | | | breast tumor | | |
| hsa-miR-4664-5p | 2364 | 3385 | discovered in | | |
| | | | breast tumor | | |
| hsa-miR-4665-3p | 2365 | 3386 | discovered in | | |
| | | | breast tumor | | |
| hsa-miR-4665-5p | 2366 | 3387 | discovered in | | |
| | | | breast tumor | | |
| hsa-miR-4666a-3p | 2367 | 3388 | discovered in | | |
| | | | breast tumor | | |
| hsa-miR-4666a-5p | 2368 | 3389 | discovered in | | |
| | | | breast tumor | | |
| hsa-miR-4666b | 2369 | 3390 | | | |
| hsa-miR-4667-3p | 2370 | 3391 | discovered in | | |
| | | | breast tumor | | |
| hsa-miR-4667-5p | 2371 | 3392 | discovered in | | |
| | | | breast tumor | | |
| hsa-miR-4668-3p | 2372 | 3393 | discovered in | | |
| | | | breast tumor | | |
| hsa-miR-4668-5p | 2373 | 3394 | discovered in | | |
| | | | breast tumor | | |
| hsa-miR-4669 | 2374 | 3395 | discovered in | | |
| | | | breast tumor | | |
| hsa-miR-4670-3p | 2375 | 3396 | discovered in | | |
| | | | breast tumor | | |
| hsa-miR-4670-5p | 2376 | 3397 | discovered in | | |
| | | | breast tumor | | |
| hsa-miR-4671-3p | 2377 | 3398 | discovered in | | |
| | | | breast tumor | | |
| hsa-miR-4671-5p | 2378 | 3399 | discovered in | | |
| | | | breast tumor | | |
| hsa-miR-4672 | 2379 | 3400 | discovered in | | |
| | | | breast tumor | | |
| hsa-miR-4673 | 2380 | 3401 | discovered in | | |
| | | | breast tumor | | |
| hsa-miR-4674 | 2381 | 3402 | discovered in | | |
| | | | breast tumor | | |
| hsa-miR-4675 | 2382 | 3403 | discovered in | | |
| | | | breast tumor | | |
| hsa-miR-4676-3p | 2383 | 3404 | discovered in | | |
| | | | breast tumor | | |
| hsa-miR-4676-5p | 2384 | 3405 | discovered in | | |
| | | | breast tumor | | |
| hsa-miR-4677-3p | 2385 | 3406 | discovered in | | |
| | | | breast tumor, | | |
| | | | psoriasis | | |
| hsa-miR-4677-5p | 2386 | 3407 | discovered in | | |
| | | | breast tumor, | | |
| | | | psoriasis | | |
| hsa-miR-4678 | 2387 | 3408 | discovered in | | |
| | | | breast tumor | | |
| hsa-miR-4679 | 2388 | 3409 | discovered in | | |
| | | | breast tumor | | |
| hsa-miR-4680-3p | 2389 | 3410 | discovered in | | |
| | | | breast tumor | | |
| hsa-miR-4680-5p | 2390 | 3411 | discovered in | | |
| | | | breast tumor | | |
| hsa-miR-4681 | 2391 | 3412 | discovered in | | |
| | | | breast tumor | | |
| hsa-miR-4682 | 2392 | 3413 | discovered in | | |
| | | | breast tumor | | |
| hsa-miR-4683 | 2393 | 3414 | discovered in | | |
| | | | breast tumor | | |
| hsa-miR-4684-3p | 2394 | 3415 | discovered in | | |
| | | | breast tumor | | |
| hsa-miR-4684-5p | 2395 | 3416 | discovered in | | |
| | | | breast tumor | | |
| hsa-miR-4685-3p | 2396 | 3417 | discovered in | | |
| | | | breast tumor | | |
| hsa-miR-4685-5p | 2397 | 3418 | discovered in | | |
| | | | breast tumor | | |
| hsa-miR-4686 | 2398 | 3419 | discovered in | | |
| | | | breast tumor | | |
| hsa-miR-4687-3p | 2399 | 3420 | discovered in | | |
| | | | breast tumor | | |
| hsa-miR-4687-5p | 2400 | 3421 | discovered in | | |
| | | | breast tumor | | |
| hsa-miR-4688 | 2401 | 3422 | discovered in | | |
| | | | breast tumor | | |
| hsa-miR-4689 | 2402 | 3423 | discovered in | | |
| | | | breast tumor | | |
| hsa-miR-4690-3p | 2403 | 3424 | discovered in | | |
| | | | breast tumor | | |
| hsa-miR-4690-5p | 2404 | 3425 | discovered in | | |
| | | | breast tumor | | |
| hsa-miR-4691-3p | 2405 | 3426 | discovered in | | |
| | | | breast tumor | | |
| hsa-miR-4691-5p | 2406 | 3427 | discovered in | | |
| | | | breast tumor | | |
| hsa-miR-4692 | 2407 | 3428 | discovered in | | |
| | | | breast tumor | | |
| hsa-miR-4693-3p | 2408 | 3429 | discovered in | | |
| | | | breast tumor | | |
| hsa-miR-4693-5p | 2409 | 3430 | discovered in | | |
| | | | breast tumor | | |
| hsa-miR-4694-3p | 2410 | 3431 | discovered in | | |
| | | | breast tumor | | |
| hsa-miR-4694-5p | 2411 | 3432 | discovered in | | |
| | | | breast tumor | | |
| hsa-miR-4695-3p | 2412 | 3433 | discovered in | | |
| | | | breast tumor | | |
| hsa-miR-4695-5p | 2413 | 3434 | discovered in | | |
| | | | breast tumor | | |
| hsa-miR-4696 | 2414 | 3435 | discovered in | | |
| | | | breast tumor | | |
| hsa-miR-4697-3p | 2415 | 3436 | discovered in | | |
| | | | breast tumor | | |
| hsa-miR-4697-5p | 2416 | 3437 | discovered in | | |
| | | | breast tumor | | |
| hsa-miR-4698 | 2417 | 3438 | discovered in | | |
| | | | breast tumor | | |
| hsa-miR-4699-3p | 2418 | 3439 | discovered in | | |
| | | | breast tumor | | |
| hsa-miR-4699-5p | 2419 | 3440 | discovered in | | |
| | | | breast tumor | | |
| hsa-miR-4700-3p | 2420 | 3441 | discovered in | | |
| | | | breast tumor | | |
| hsa-miR-4700-5p | 2421 | 3442 | discovered in | | |
| | | | breast tumor | | |
| hsa-miR-4701-3p | 2422 | 3443 | discovered in | | |
| | | | breast tumor | | |
| hsa-miR-4701-5p | 2423 | 3444 | discovered in | | |
| | | | breast tumor | | |
| hsa-miR-4703-3p | 2424 | 3445 | discovered in | | |
| | | | breast tumor | | |
| hsa-miR-4703-5p | 2425 | 3446 | discovered in | | |
| | | | breast tumor | | |
| hsa-miR-4704-3p | 2426 | 3447 | discovered in | | |
| | | | breast tumor | | |
| hsa-miR-4704-5p | 2427 | 3448 | discovered in | | |
| | | | breast tumor | | |
| hsa-miR-4705 | 2428 | 3449 | discovered in | | |
| | | | breast tumor | | |
| hsa-miR-4706 | 2429 | 3450 | discovered in | | |
| | | | breast tumor | | |
| hsa-miR-4707-3p | 2430 | 3451 | discovered in | | |
| | | | breast tumor | | |
| hsa-miR-4707-5p | 2431 | 3452 | discovered in | | |
| | | | breast tumor | | |
| hsa-miR-4708-3p | 2432 | 3453 | discovered in | | |
| | | | breast tumor | | |
| hsa-miR-4708-5p | 2433 | 3454 | discovered in | | |
| | | | breast tumor | | |
| hsa-miR-4709-3p | 2434 | 3455 | discovered in | | |
| | | | breast tumor | | |
| hsa-miR-4709-5p | 2435 | 3456 | discovered in | | |
| | | | breast tumor | | |
| hsa-miR-4710 | 2436 | 3457 | discovered in | | |
| | | | breast tumor | | |
| hsa-miR-4711-3p | 2437 | 3458 | discovered in | | |
| | | | breast tumor | | |
| hsa-miR-4711-5p | 2438 | 3459 | discovered in | | |
| | | | breast tumor | | |
| hsa-miR-4712-3p | 2439 | 3460 | discovered in | | |
| | | | breast tumor | | |
| hsa-miR-4712-5p | 2440 | 3461 | discovered in | | |
| | | | breast tumor | | |
| hsa-miR-4713-3p | 2441 | 3462 | discovered in | | |
| | | | breast tumor | | |
| hsa-miR-4713-5p | 2442 | 3463 | discovered in | | |
| | | | breast tumor | | |
| hsa-miR-4714-3p | 2443 | 3464 | discovered in | | |
| | | | breast tumor | | |
| hsa-miR-4714-5p | 2444 | 3465 | discovered in | | |
| | | | breast tumor | | |
| hsa-miR-4715-3p | 2445 | 3466 | discovered in | | |
| | | | breast tumor | | |
| hsa-miR-4715-5p | 2446 | 3467 | discovered in | | |
| | | | breast tumor | | |
| hsa-miR-4716-3p | 2447 | 3468 | discovered in | | |
| | | | breast tumor | | |
| hsa-miR-4716-5p | 2448 | 3469 | discovered in | | |
| | | | breast tumor | | |
| hsa-miR-4717-3p | 2449 | 3470 | discovered in | | |
| | | | breast tumor | | |
| hsa-miR-4717-5p | 2450 | 3471 | discovered in | | |
| | | | breast tumor | | |
| hsa-miR-4718 | 2451 | 3472 | discovered in | | |
| | | | breast tumor | | |
| hsa-miR-4719 | 2452 | 3473 | discovered in | | |
| | | | breast tumor | | |
| hsa-miR-4720-3p | 2453 | 3474 | discovered in | | |
| | | | breast tumor | | |
| hsa-miR-4720-5p | 2454 | 3475 | discovered in | | |
| | | | breast tumor | | |
| hsa-miR-4721 | 2455 | 3476 | discovered in | | |
| | | | breast tumor | | |
| hsa-miR-4722-3p | 2456 | 3477 | discovered in | | |
| | | | breast tumor | | |
| hsa-miR-4722-5p | 2457 | 3478 | discovered in | | |
| | | | breast tumor | | |
| hsa-miR-4723-3p | 2458 | 3479 | discovered in | | |
| | | | breast tumor | | |
| hsa-miR-4723-5p | 2459 | 3480 | discovered in | | |
| | | | breast tumor | | |
| hsa-miR-4724-3p | 2460 | 3481 | discovered in | | |
| | | | breast tumor | | |
| hsa-miR-4724-5p | 2461 | 3482 | discovered in | | |
| | | | breast tumor | | |
| hsa-miR-4725-3p | 2462 | 3483 | discovered in | | |
| | | | breast tumor | | |
| hsa-miR-4725-5p | 2463 | 3484 | discovered in | | |
| | | | breast tumor | | |
| hsa-miR-4726-3p | 2464 | 3485 | discovered in | | |
| | | | breast tumor | | |
| hsa-miR-4726-5p | 2465 | 3486 | discovered in | | |
| | | | breast tumor | | |
| hsa-miR-4727-3p | 2466 | 3487 | discovered in | | |
| | | | breast tumor | | |
| hsa-miR-4727-5p | 2467 | 3488 | discovered in | | |
| | | | breast tumor | | |
| hsa-miR-4728-3p | 2468 | 3489 | discovered in | | |
| | | | breast tumor | | |
| hsa-miR-4728-5p | 2469 | 3490 | discovered in | | |
| | | | breast tumor | | |
| hsa-miR-4729 | 2470 | 3491 | discovered in | | |
| | | | breast tumor | | |
| hsa-miR-4730 | 2471 | 3492 | discovered in | | |
| | | | breast tumor | | |
| hsa-miR-4731-3p | 2472 | 3493 | discovered in | | |
| | | | breast tumor | | |
| hsa-miR-4731-5p | 2473 | 3494 | discovered in | | |
| | | | breast tumor | | |
| hsa-miR-4732-3p | 2474 | 3495 | discovered in | | |
| | | | breast tumor | | |
| hsa-miR-4732-5p | 2475 | 3496 | discovered in | | |
| | | | breast tumor | | |
| hsa-miR-4733-3p | 2476 | 3497 | discovered in | | |
| | | | breast tumor | | |
| hsa-miR-4733-5p | 2477 | 3498 | discovered in | | |
| | | | breast tumor | | |
| hsa-miR-4734 | 2478 | 3499 | discovered in | | |
| | | | breast tumor | | |
| hsa-miR-4735-3p | 2479 | 3500 | discovered in | | |
| | | | breast tumor | | |
| hsa-miR-4735-5p | 2480 | 3501 | discovered in | | |
| | | | breast tumor | | |
| hsa-miR-4736 | 2481 | 3502 | discovered in | | |
| | | | breast tumor | | |
| hsa-miR-4737 | 2482 | 3503 | discovered in | | |
| | | | breast tumor | | |
| hsa-miR-4738-3p | 2483 | 3504 | discovered in | | |
| | | | breast tumor | | |
| hsa-miR-4738-5p | 2484 | 3505 | discovered in | | |
| | | | breast tumor | | |
| hsa-miR-4739 | 2485 | 3506 | discovered in | | |
| | | | breast tumor | | |
| hsa-miR-4740-3p | 2486 | 3507 | discovered in | | |
| | | | breast tumor | | |
| hsa-miR-4740-5p | 2487 | 3508 | discovered in | | |
| | | | breast tumor | | |
| hsa-miR-4741 | 2488 | 3509 | discovered in | | |
| | | | breast tumor, | | |
| | | | psoriasis | | |
| hsa-miR-4742-3p | 2489 | 3510 | discovered in | | |
| | | | breast tumor, | | |
| | | | psoriasis | | |
| hsa-miR-4742-5p | 2490 | 3511 | discovered in | | |
| | | | breast tumor | | |
| hsa-miR-4743-3p | 2491 | 3512 | discovered in | | |
| | | | breast tumor | | |
| hsa-miR-4743-5p | 2492 | 3513 | discovered in | | |
| | | | breast tumor | | |
| hsa-miR-4744 | 2493 | 3514 | discovered in | | |
| | | | breast tumor | | |
| hsa-miR-4745-3p | 2494 | 3515 | discovered in | | |
| | | | breast tumor | | |
| hsa-miR-4745-5p | 2495 | 3516 | discovered in | | |
| | | | breast tumor | | |
| hsa-miR-4746-3p | 2496 | 3517 | discovered in | | |
| | | | breast tumor | | |
| hsa-miR-4746-5p | 2497 | 3518 | discovered in | | |
| | | | breast tumor | | |
| hsa-miR-4747-3p | 2498 | 3519 | discovered in | | |
| | | | breast tumor | | |
| hsa-miR-4747-5p | 2499 | 3520 | discovered in | | |
| | | | breast tumor | | |
| hsa-miR-4748 | 2500 | 3521 | discovered in | | |
| | | | breast tumor | | |
| hsa-miR-4749-3p | 2501 | 3522 | discovered in | | |
| | | | breast tumor | | |
| hsa-miR-4749-5p | 2502 | 3523 | discovered in | | |
| | | | breast tumor | | |
| hsa-miR-4750-3p | 2503 | 3524 | discovered in | | |
| | | | breast tumor | | |
| hsa-miR-4750-5p | 2504 | 3525 | discovered in | | |
| | | | breast tumor | | |
| hsa-miR-4751 | 2505 | 3526 | discovered in | | |
| | | | breast tumor | | |
| hsa-miR-4752 | 2506 | 3527 | discovered in | | |
| | | | breast tumor | | |
| hsa-miR-4753-3p | 2507 | 3528 | discovered in | | |
| | | | breast tumor | | |
| hsa-miR-4753-5p | 2508 | 3529 | discovered in | | |
| | | | breast tumor | | |
| hsa-miR-4754 | 2509 | 3530 | discovered in | | |
| | | | breast tumor | | |
| hsa-miR-4755-3p | 2510 | 3531 | discovered in | | |
| | | | breast tumor | | |
| hsa-miR-4755-5p | 2511 | 3532 | discovered in | | |
| | | | breast tumor | | |
| hsa-miR-4756-3p | 2512 | 3533 | discovered in | | |
| | | | breast tumor | | |
| hsa-miR-4756-5p | 2513 | 3534 | discovered in | | |
| | | | breast tumor | | |
| hsa-miR-4757-3p | 2514 | 3535 | discovered in | | |
| | | | breast tumor | | |
| hsa-miR-4757-5p | 2515 | 3536 | discovered in | | |
| | | | breast tumor | | |
| hsa-miR-4758-3p | 2516 | 3537 | discovered in | | |
| | | | breast tumor | | |
| hsa-miR-4758-5p | 2517 | 3538 | discovered in | | |
| | | | breast tumor | | |
| hsa-miR-4759 | 2518 | 3539 | discovered in | | |
| | | | breast tumor | | |
| hsa-miR-4760-3p | 2519 | 3540 | discovered in | | |
| | | | breast tumor | | |
| hsa-miR-4760-5p | 2520 | 3541 | discovered in | | |
| | | | breast tumor | | |
| hsa-miR-4761-3p | 2521 | 3542 | discovered in | | |
| | | | breast tumor | | |
| hsa-miR-4761-5p | 2522 | 3543 | discovered in | | |
| | | | breast tumor | | |
| hsa-miR-4762-3p | 2523 | 3544 | discovered in | | |
| | | | breast tumor | | |
| hsa-miR-4762-5p | 2524 | 3545 | discovered in | | |
| | | | breast tumor | | |
| hsa-miR-4763-3p | 2525 | 3546 | discovered in | | |
| | | | breast tumor | | |
| hsa-miR-4763-5p | 2526 | 3547 | discovered in | | |
| | | | breast tumor | | |
| hsa-miR-4764-3p | 2527 | 3548 | discovered in | | |
| | | | breast tumor | | |
| hsa-miR-4764-5p | 2528 | 3549 | discovered in | | |
| | | | breast tumor | | |
| hsa-miR-4765 | 2529 | 3550 | discovered in | | |
| | | | breast tumor | | |
| hsa-miR-4766-3p | 2530 | 3551 | discovered in | | |
| | | | breast tumor | | |
| hsa-miR-4766-5p | 2531 | 3552 | discovered in | | |
| | | | breast tumor | | |
| hsa-miR-4767 | 2532 | 3553 | discovered in | | |
| | | | breast tumor | | |
| hsa-miR-4768-3p | 2533 | 3554 | discovered in | | |
| | | | breast tumor | | |
| hsa-miR-4768-5p | 2534 | 3555 | discovered in | | |
| | | | breast tumor | | |
| hsa-miR-4769-3p | 2535 | 3556 | discovered in | | |
| | | | breast tumor | | |
| hsa-miR-4769-5p | 2536 | 3557 | discovered in | | |
| | | | breast tumor | | |
| hsa-miR-4770 | 2537 | 3558 | discovered in | | |
| | | | breast tumor | | |
| hsa-miR-4771 | 2538 | 3559 | discovered in | | |
| | | | breast tumor | | |
| hsa-miR-4772-3p | 2539 | 3560 | discovered in | energy | |
| | | | breast tumor, | metabolism/ | |
| | | | blood monoclear | obesity | |
| | | | cells | | |
| hsa-miR-4772-5p | 2540 | 3561 | discovered in | energy | |
| | | | breast tumor, | metabolism/ | |
| | | | blood monoclear | obesity | |
| | | | cells | | |
| hsa-miR-4773 | 2541 | 3562 | discovered in | | |
| | | | breast tumor | | |
| hsa-miR-4774-3p | 2542 | 3563 | discovered in | | |
| | | | breast tumor and | | |
| | | | Lymphoblastic | | |
| | | | leukemia | | |
| hsa-miR-4774-5p | 2543 | 3564 | discovered in | | |
| | | | breast tumor and | | |
| | | | Lymphoblastic | | |
| | | | leukemia | | |
| hsa-miR-4775 | 2544 | 3565 | discovered in | | |
| | | | breast tumor | | |
| hsa-miR-4776-3p | 2545 | 3566 | discovered in | | |
| | | | breast tumor | | |
| hsa-miR-4776-5p | 2546 | 3567 | discovered in | | |
| | | | breast tumor | | |
| hsa-miR-4777-3p | 2547 | 3568 | discovered in | | |
| | | | breast tumor | | |
| hsa-miR-4777-5p | 2548 | 3569 | discovered in | | |
| | | | breast tumor | | |
| hsa-miR-4778-3p | 2549 | 3570 | discovered in | | |
| | | | breast tumor | | |
| hsa-miR-4778-5p | 2550 | 3571 | discovered in | | |
| | | | breast tumor | | |
| hsa-miR-4779 | 2551 | 3572 | discovered in | | |
| | | | breast tumor | | |
| hsa-miR-4780 | 2552 | 3573 | discovered in | | |
| | | | breast tumor | | |
| hsa-miR-4781-3p | 2553 | 3574 | discovered in | | |
| | | | breast tumor | | |
| hsa-miR-4781-5p | 2554 | 3575 | discovered in | | |
| | | | breast tumor | | |
| hsa-miR-4782-3p | 2555 | 3576 | discovered in | | |
| | | | breast tumor | | |
| hsa-miR-4782-5p | 2556 | 3577 | discovered in | | |
| | | | breast tumor | | |
| hsa-miR-4783-3p | 2557 | 3578 | discovered in | | |
| | | | breast tumor | | |
| hsa-miR-4783-5p | 2558 | 3579 | discovered in | | |
| | | | breast tumor | | |
| hsa-miR-4784 | 2559 | 3580 | discovered in | | |
| | | | breast tumor | | |
| hsa-miR-4785 | 2560 | 3581 | discovered in | | |
| | | | breast tumor | | |
| hsa-miR-4786-3p | 2561 | 3582 | discovered in | | |
| | | | breast tumor | | |
| hsa-miR-4786-5p | 2562 | 3583 | discovered in | | |
| | | | breast tumor | | |
| hsa-miR-4787-3p | 2563 | 3584 | discovered in | | |
| | | | breast tumor | | |
| hsa-miR-4787-5p | 2564 | 3585 | discovered in | | |
| | | | breast tumor | | |
| hsa-miR-4788 | 2565 | 3586 | discovered in | | |
| | | | breast tumor | | |
| hsa-miR-4789-3p | 2566 | 3587 | discovered in | | |
| | | | breast tumor | | |
| hsa-miR-4789-5p | 2567 | 3588 | discovered in | | |
| | | | breast tumor | | |
| hsa-miR-4790-3p | 2568 | 3589 | discovered in | | |
| | | | breast tumor | | |
| hsa-miR-4790-5p | 2569 | 3590 | discovered in | | |
| | | | breast tumor | | |
| hsa-miR-4791 | 2570 | 3591 | discovered in | | |
| | | | breast tumor | | |
| hsa-miR-4792 | 2571 | 3592 | discovered in | | |
| | | | breast tumor | | |
| hsa-miR-4793-3p | 2572 | 3593 | discovered in | | |
| | | | breast tumor | | |
| hsa-miR-4793-5p | 2573 | 3594 | discovered in | | |
| | | | breast tumor | | |
| hsa-miR-4794 | 2574 | 3595 | discovered in | | |
| | | | breast tumor | | |
| hsa-miR-4795-3p | 2575 | 3596 | discovered in | | |
| | | | breast tumor | | |
| hsa-miR-4795-5p | 2576 | 3597 | discovered in | | |
| | | | breast tumor | | |
| hsa-miR-4796-3p | 2577 | 3598 | discovered in | | |
| | | | breast tumor | | |
| hsa-miR-4796-5p | 2578 | 3599 | discovered in | | |
| | | | breast tumor | | |
| hsa-miR-4797-3p | 2579 | 3600 | discovered in | | |
| | | | breast tumor | | |
| hsa-miR-4797-5p | 2580 | 3601 | discovered in | | |
| | | | breast tumor | | |
| hsa-miR-4798-3p | 2581 | 3602 | discovered in | | |
| | | | breast tumor | | |
| hsa-miR-4798-5p | 2582 | 3603 | discovered in | | |
| | | | breast tumor | | |
| hsa-miR-4799-3p | 2583 | 3604 | discovered in | | |
| | | | breast tumor | | |
| hsa-miR-4799-5p | 2584 | 3605 | discovered in | | |
| | | | breast tumor | | |
| hsa-miR-4800-3p | 2585 | 3606 | discovered in | | |
| | | | breast tumor | | |
| hsa-miR-4800-5p | 2586 | 3607 | discovered in | | |
| | | | breast tumor | | |
| hsa-miR-4801 | 2587 | 3608 | discovered in | | |
| | | | breast tumor | | |
| hsa-miR-4802-3p | 2588 | 3609 | discovered in | | |
| | | | breast tumor, | | |
| | | | psoriasis | | |
| hsa-miR-4802-5p | 2589 | 3610 | discovered in | | |
| | | | breast tumor, | | |
| | | | psoriasis | | |
| hsa-miR-4803 | 2590 | 3611 | discovered in | | |
| | | | breast tumor | | |
| hsa-miR-4804-3p | 2591 | 3612 | discovered in | | |
| | | | breast tumor | | |
| hsa-miR-4804-5p | 2592 | 3613 | discovered in | | |
| | | | breast tumor | | |
| hsa-miR-483-3p | 2593 | 3614 | | aderonocortical | oncogenic |
| | | | | carcinoma, | |
| | | | | rectal/pancreatic | |
| | | | | cancer, | |
| | | | | proliferation of | |
| | | | | wounded epithelial | |
| | | | | cells | |
| hsa-miR-483-5p | 2594 | 3615 | cartilage | aderonocortical | angiogenesis |
| | | | (chondrocyte), | carcinoma | |
| | | | fetal brain | | |
| hsa-miR-484 | 2595 | 3616 | | | mitochondrial |
| | | | | | network |
| hsa-miR-485-3p | 2596 | 3617 | | | |
| hsa-miR-485-5p | 2597 | 3618 | | ovarian epithelial | |
| | | | | tumor | |
| hsa-miR-486-3p | 2598 | 3619 | erythroid cells | various cancers | |
| hsa-miR-486-5p | 2599 | 3620 | stem cells | various cancers | |
| | | | (adipose) | | |
| hsa-miR-487a | 2600 | 3621 | | laryngeal | |
| | | | | carcinoma | |
| hsa-miR-487b | 2601 | 3622 | | neuroblastoma, | |
| | | | | pulmonary | |
| | | | | carcinogenesis | |
| hsa-miR-488-3p | 2602 | 3623 | | prostate cancer, | |
| | | | | others | |
| hsa-miR-488-5p | 2603 | 3624 | | prostate cancer, | |
| | | | | others | |
| hsa-miR-489 | 2604 | 3625 | mesenchymal stem | osteogenesis | |
| | | | cells | | |
| hsa-miR-490-3p | 2605 | 3626 | | neuroblastoma, | |
| | | | | terine leiomyoma | |
| | | | | (ULM)/muscle | |
| hsa-miR-490-5p | 2606 | 3627 | | neuroblastoma, | |
| | | | | terine leiomyoma | |
| | | | | (ULM)/muscle | |
| hsa-miR-491-3p | 2607 | 3628 | | various cancers, | pro-apoptosis |
| | | | | brain disease | |
| hsa-miR-491-5p | 2608 | 3629 | | various cancers, | pro-apoptosis |
| | | | | brain disease | |
| hsa-miR-492 | 2609 | 3630 | | | |
| hsa-miR-493-3p | 2610 | 3631 | myeloid cells, | | |
| | | | pancreas (islet) | | |
| hsa-miR-493-5p | 2611 | 3632 | myeloid cells, | | |
| | | | pancreas (islet) | | |
| hsa-miR-494 | 2612 | 3633 | epithelial cells | various cancers | cell cycle |
| hsa-miR-495-3p | 2613 | 3634 | platelet | various cancers | |
| | | | | (gastric, MLL | |
| | | | | leukemia, | |
| | | | | pancreatic etc) and | |
| | | | | inflammation | |
| hsa-miR-495-5p | 2614 | 3635 | platelet | various cancers | |
| | | | | (gastric, MLL | |
| | | | | leukemia, | |
| | | | | pancreatic etc) and | |
| | | | | inflammation | |
| hsa-miR-496 | 2615 | 3636 | Blood | | |
| hsa-miR-497-3p | 2616 | 3637 | | various cancers | tumor |
| | | | | (breast, colorectal, | supressor/pro- |
| | | | | etc) | apoptosis |
| hsa-miR-497-5p | 2617 | 3638 | | various cancers | tumor |
| | | | | (breast, colorectal, | supressor/pro- |
| | | | | etc) | apoptosis |
| hsa-miR-498 | 2618 | 3639 | | autoimmuno (e.g. | |
| | | | | rheumatoid | |
| | | | | arthritis) | |
| hsa-miR-4999-3p | 2619 | 3640 | | | |
| hsa-miR-4999-5p | 2620 | 3641 | | | |
| hsa-miR-499a-3p | 2621 | 3642 | heart, cardiac | cardiovascular | cardiomyocyte |
| | | | stem cells | disease | differentiation |
| hsa-miR-499a-5p | 2622 | 3643 | heart, cardiac | cardiovascular | cardiomyocyte |
| | | | stem cells | disease | differentiation |
| hsa-miR-499b-3p | 2623 | 3644 | heart, cardiac | cardiovascular | cardiomyocyte |
| | | | stem cells | disease | differentiation |
| hsa-miR-499b-5p | 2624 | 3645 | heart, cardiac | cardiovascular | cardiomyocyte |
| | | | stem cells | disease | differentiation |
| hsa-miR-5000-3p | 2625 | 3646 | discovered in | | |
| | | | lymphoblastic | | |
| | | | leukaemia | | |
| hsa-miR-5000-5p | 2626 | 3647 | discovered in | | |
| | | | lymphoblastic | | |
| | | | leukaemia | | |
| hsa-miR-5001-3p | 2627 | 3648 | | | |
| hsa-miR-5001-5p | 2628 | 3649 | | | |
| hsa-miR-5002-3p | 2629 | 3650 | | | |
| hsa-miR-5002-5p | 2630 | 3651 | | | |
| hsa-miR-5003-3p | 2631 | 3652 | | | |
| hsa-miR-5003-5p | 2632 | 3653 | | | |
| hsa-miR-5004-3p | 2633 | 3654 | | | |
| hsa-miR-5004-5p | 2634 | 3655 | | | |
| hsa-miR-5006-3p | 2635 | 3656 | discovered in | | |
| | | | lymphoblastic | | |
| | | | leukaemia | | |
| hsa-miR-5006-5p | 2636 | 3657 | discovered in | | |
| | | | lymphoblastic | | |
| | | | leukaemia | | |
| hsa-miR-5007-3p | 2637 | 3658 | | | |
| hsa-miR-5007-5p | 2638 | 3659 | | | |
| hsa-miR-5008-3p | 2639 | 3660 | | | |
| hsa-miR-5008-5p | 2640 | 3661 | | | |
| hsa-miR-5009-3p | 2641 | 3662 | | | |
| hsa-miR-5009-5p | 2642 | 3663 | | | |
| hsa-miR-500a-3p | 2643 | 3664 | | | |
| hsa-miR-500a-5p | 2644 | 3665 | | | |
| hsa-miR-500b | 2645 | 3666 | Blood (plasma) | | |
| hsa-miR-5010-3p | 2646 | 3667 | | abnormal skin | |
| | | | | (psoriasis) | |
| hsa-miR-5010-5p | 2647 | 3668 | | abnormal skin | |
| | | | | (psoriasis) | |
| hsa-miR-5011-3p | 2648 | 3669 | | | |
| hsa-miR-5011-5p | 2649 | 3670 | | | |
| hsa-miR-501-3p | 2650 | 3671 | | | |
| hsa-miR-501-5p | 2651 | 3672 | | | |
| hsa-miR-502-3p | 2652 | 3673 | | various cancers | |
| | | | | (hepatocellular, | |
| | | | | ovarian, breast) | |
| hsa-miR-502-5p | 2653 | 3674 | | various cancers | |
| | | | | (hepatocellular, | |
| | | | | ovarian, breast) | |
| hsa-miR-503-3p | 2654 | 3675 | ovary | | |
| hsa-miR-503-5p | 2655 | 3676 | ovary | | |
| hsa-miR-504 | 2656 | 3677 | | glioblastoma | |
| hsa-miR-5047 | 2657 | 3678 | | | |
| hsa-miR-505-3p | 2658 | 3679 | | breast cancer | |
| hsa-miR-505-5p | 2659 | 3680 | | breast cancer | |
| hsa-miR-506-3p | 2660 | 3681 | | various cancers | |
| hsa-miR-506-5p | 2661 | 3682 | | various cancers | |
| hsa-miR-507 | 2662 | 3683 | | | |
| hsa-miR-508-3p | 2663 | 3684 | | renal cell | |
| | | | | carcinoma | |
| hsa-miR-508-5p | 2664 | 3685 | endothelial | | |
| | | | progenitor cells | | |
| | | | (EPCs) | | |
| hsa-miR-5087 | 2665 | 3686 | | | |
| hsa-miR-5088 | 2666 | 3687 | | | |
| hsa-miR-5089-3p | 2667 | 3688 | | | |
| hsa-miR-5089-5p | 2668 | 3689 | | | |
| hsa-miR-5090 | 2669 | 3690 | | | |
| hsa-miR-5091 | 2670 | 3691 | | | |
| hsa-miR-5092 | 2671 | 3692 | | | |
| hsa-miR-5093 | 2672 | 3693 | | | |
| hsa-miR-509-3-5p | 2673 | 3694 | testis | | |
| hsa-miR-509-3p | 2674 | 3695 | | renal cell | |
| | | | | carcinoma, brain | |
| | | | | disease | |
| hsa-miR-5094 | 2675 | 3696 | | | |
| hsa-miR-5095 | 2676 | 3697 | | cervical cancer | |
| hsa-miR-509-5p | 2677 | 3698 | | metabolic | |
| | | | | syndrome, brain | |
| | | | | disease | |
| hsa-miR-5096 | 2678 | 3699 | | cervical cance | |
| hsa-miR-510 | 2679 | 3700 | brain | | |
| hsa-miR-5100 | 2680 | 3701 | discoverd in | | |
| | | | Salivary gland | | |
| hsa-miR-511 | 2681 | 3702 | dendritic cells and | | |
| | | | macrophages | | |
| hsa-miR-512-3p | 2682 | 3703 | embryonic stem | | |
| | | | cells, placenta | | |
| hsa-miR-512-5p | 2683 | 3704 | embryonic stem | | |
| | | | cells, placenta, | | |
| hsa-miR-513a-3p | 2684 | 3705 | | lung carcinoma | |
| hsa-miR-513a-5p | 2685 | 3706 | endothelial cells | | |
| hsa-miR-513b | 2686 | 3707 | | follicular | |
| | | | | lymphoma | |
| hsa-miR-513c-3p | 2687 | 3708 | | | |
| hsa-miR-513c-5p | 2688 | 3709 | | | |
| hsa-miR-514a-3p | 2689 | 3710 | | | |
| hsa-miR-514a-5p | 2690 | 3711 | | | |
| hsa-miR-514b-3p | 2691 | 3712 | | various cancer | |
| | | | | cells | |
| hsa-miR-514b-5p | 2692 | 3713 | | various cancer | |
| | | | | cells | |
| hsa-miR-515-3p | 2693 | 3714 | | | |
| hsa-miR-515-5p | 2694 | 3715 | placenta | | |
| hsa-miR-516a-3p | 2695 | 3716 | frontal cortex | | |
| hsa-miR-516a-5p | 2696 | 3717 | placenta | | |
| hsa-miR-516b-3p | 2697 | 3718 | | | |
| hsa-miR-516b-5p | 2698 | 3719 | | | |
| hsa-miR-517-5p | 2699 | 3720 | placenta | | |
| hsa-miR-517a-3p | 2700 | 3721 | placenta | | |
| hsa-miR-517b-3p | 2701 | 3722 | placenta | | |
| hsa-miR-517c-3p | 2702 | 3723 | placenta | | |
| hsa-miR-5186 | 2703 | 3724 | discovered in | | |
| | | | lymphoblastic | | |
| | | | leukaemia | | |
| hsa-miR-5187-3p | 2704 | 3725 | discovered in | | |
| | | | lymphoblastic | | |
| | | | leukaemia, skin | | |
| | | | (psoriasis) | | |
| hsa-miR-5187-5p | 2705 | 3726 | discovered in | | |
| | | | lymphoblastic | | |
| | | | leukaemia, skin | | |
| | | | (psoriasis) | | |
| hsa-miR-5188 | 2706 | 3727 | discovered in | | |
| | | | lymphoblastic | | |
| | | | leukaemia | | |
| hsa-miR-5189 | 2707 | 3728 | discovered in | | |
| | | | lymphoblastic | | |
| | | | leukaemia | | |
| hsa-miR-518a-3p | 2708 | 3729 | | HCC | |
| hsa-miR-518a-5p | 2709 | 3730 | | various cancer | |
| | | | | cells | |
| hsa-miR-518b | 2710 | 3731 | placenta | HCC | cell cycle |
| | | | | | progression |
| hsa-miR-518c-3p | 2711 | 3732 | placenta | | |
| hsa-miR-518c-5p | 2712 | 3733 | placenta | | |
| hsa-miR-518d-3p | 2713 | 3734 | | | |
| hsa-miR-518d-5p | 2714 | 3735 | | | |
| hsa-miR-518e-3p | 2715 | 3736 | | HCC | cell cycle |
| | | | | | progression |
| hsa-miR-518e-5p | 2716 | 3737 | | HCC | cell cycle |
| | | | | | progression |
| hsa-miR-518f-3p | 2717 | 3738 | placenta | | |
| hsa-miR-518f-5p | 2718 | 3739 | placenta | | |
| hsa-miR-5190 | 2719 | 3740 | discovered in | | |
| | | | lymphoblastic | | |
| | | | leukaemia | | |
| hsa-miR-5191 | 2720 | 3741 | discovered in | | |
| | | | lymphoblastic | | |
| | | | leukaemia | | |
| hsa-miR-5192 | 2721 | 3742 | discovered in | | |
| | | | lymphoblastic | | |
| | | | leukaemia | | |
| hsa-miR-5193 | 2722 | 3743 | discovered in | | |
| | | | lymphoblastic | | |
| | | | leukaemia | | |
| hsa-miR-5194 | 2723 | 3744 | discovered in | | |
| | | | lymphoblastic | | |
| | | | leukaemia | | |
| hsa-miR-5195-3p | 2724 | 3745 | discovered in | | |
| | | | lymphoblastic | | |
| | | | leukaemia | | |
| hsa-miR-5195-5p | 2725 | 3746 | discovered in | | |
| | | | lymphoblastic | | |
| | | | leukaemia | | |
| hsa-miR-5196-3p | 2726 | 3747 | discovered in | | |
| | | | lymphoblastic | | |
| | | | leukaemia | | |
| hsa-miR-5196-5p | 2727 | 3748 | discovered in | | |
| | | | lymphoblastic | | |
| | | | leukaemia | | |
| hsa-miR-5197-3p | 2728 | 3749 | discovered in | | |
| | | | lymphoblastic | | |
| | | | leukaemia | | |
| hsa-miR-5197-5p | 2729 | 3750 | discovered in | | |
| | | | lymphoblastic | | |
| | | | leukaemia | | |
| hsa-miR-519a-3p | 2730 | 3751 | placenta | HCC | |
| hsa-miR-519a-5p | 2731 | 3752 | placenta | HCC | |
| hsa-miR-519b-3p | 2732 | 3753 | | breast cancer | |
| hsa-miR-519b-5p | 2733 | 3754 | | breast cancer | |
| hsa-miR-519c-3p | 2734 | 3755 | | | |
| hsa-miR-519c-5p | 2735 | 3756 | | | |
| hsa-miR-519d | 2736 | 3757 | placenta | | |
| hsa-miR-519e-3p | 2737 | 3758 | placenta | | |
| hsa-miR-519e-5p | 2738 | 3759 | placenta | | |
| hsa-miR-520a-3p | 2739 | 3760 | placenta | | |
| hsa-miR-520a-5p | 2740 | 3761 | placenta | | |
| hsa-miR-520b | 2741 | 3762 | | breast cancer | |
| hsa-miR-520c-3p | 2742 | 3763 | | gastric cancer, | |
| | | | | breast tumor | |
| hsa-miR-520c-5p | 2743 | 3764 | | breast tumor | |
| hsa-miR-520d-3p | 2744 | 3765 | | various cancer | |
| | | | | cells | |
| hsa-miR-520d-5p | 2745 | 3766 | | various cancer | |
| | | | | cells | |
| hsa-miR-520e | 2746 | 3767 | | hepatoma | tomor |
| | | | | | suppressor |
| hsa-miR-520f | 2747 | 3768 | | breast cancer | |
| hsa-miR-520g | 2748 | 3769 | | HCC, bladder | |
| | | | | cancer, breast | |
| | | | | cancer | |
| hsa-miR-520h | 2749 | 3770 | placental specific | | |
| hsa-miR-521 | 2750 | 3771 | | prostate cancer | |
| hsa-miR-522-3p | 2751 | 3772 | | HCC | |
| hsa-miR-522-5p | 2752 | 3773 | | HCC | |
| hsa-miR-523-3p | 2753 | 3774 | | | |
| hsa-miR-523-5p | 2754 | 3775 | | | |
| hsa-miR-524-3p | 2755 | 3776 | | colon cancer stem | |
| | | | | cells | |
| hsa-miR-524-5p | 2756 | 3777 | placental specific | gliomas | |
| hsa-miR-525-3p | 2757 | 3778 | placental specific | HCC | |
| hsa-miR-525-5p | 2758 | 3779 | placental specific | | |
| hsa-miR-526a | 2759 | 3780 | placental specific | | |
| hsa-miR-526b-3p | 2760 | 3781 | placental specific | | |
| hsa-miR-526b-5p | 2761 | 3782 | placental specific | | |
| hsa-miR-527 | 2762 | 3783 | | | |
| hsa-miR-532-3p | 2763 | 3784 | | ALL | |
| hsa-miR-532-5p | 2764 | 3785 | | ALL | |
| hsa-miR-539-3p | 2765 | 3786 | | | |
| hsa-miR-539-5p | 2766 | 3787 | | | |
| hsa-miR-541-3p | 2767 | 3788 | | | |
| hsa-miR-541-5p | 2768 | 3789 | | | |
| hsa-miR-542-3p | 2769 | 3790 | monocytes | | |
| hsa-miR-542-5p | 2770 | 3791 | | basal cell | |
| | | | | carcinoma, | |
| | | | | neuroblastoma | |
| hsa-miR-543 | 2771 | 3792 | | | |
| hsa-miR-544a | 2772 | 3793 | | osteocarcoma | |
| hsa-miR-544b | 2773 | 3794 | | osteocarcoma | |
| hsa-miR-545-3p | 2774 | 3795 | | | |
| hsa-miR-545-5p | 2775 | 3796 | | rectal cancer | |
| hsa-miR-548 | 2776 | 3797 | | | |
| hsa-miR-548-3p | 2777 | 3798 | | | |
| hsa-miR-548-5p | 2778 | 3799 | | | |
| hsa-miR-548a | 2779 | 3800 | identified in | | |
| | | | colorectal | | |
| | | | microRNAome | | |
| hsa-miR-548a-3p | 2780 | 3801 | identified in | | |
| | | | colorectal | | |
| | | | microRNAome | | |
| hsa-miR-548a-5p | 2781 | 3802 | identified in | | |
| | | | colorectal | | |
| | | | microRNAome | | |
| hsa-miR-548aa | 2782 | 3803 | identified in | | |
| | | | cervical tumor | | |
| hsa-miR-548ab | 2783 | 3804 | discovered in B- | | |
| | | | cells | | |
| hsa-miR-548ac | 2784 | 3805 | discovered in B- | | |
| | | | cells | | |
| hsa-miR-548ad | 2785 | 3806 | discovered in B- | | |
| | | | cells | | |
| hsa-miR-548ae | 2786 | 3807 | discovered in B- | | |
| | | | cells | | |
| hsa-miR-548ag | 2787 | 3808 | discovered in B- | | |
| | | | cells | | |
| hsa-miR-548ah-3p | 2788 | 3809 | discovered in B- | | |
| | | | cells | | |
| hsa-miR-548ah-5p | 2789 | 3810 | discovered in B- | | |
| | | | cells | | |
| hsa-miR-548ai | 2790 | 3811 | discovered in B- | | |
| | | | cells | | |
| hsa-miR-548aj-3p | 2791 | 3812 | discovered in B- | | |
| | | | cells | | |
| hsa-miR-548aj-5p | 2792 | 3813 | discovered in B- | | |
| | | | cells | | |
| hsa-miR-548ak | 2793 | 3814 | discovered in B- | | |
| | | | cells | | |
| hsa-miR-548al | 2794 | 3815 | discovered in B- | | |
| | | | cells | | |
| hsa-miR-548am-3p | 2795 | 3816 | discovered in B- | | |
| | | | cells | | |
| hsa-miR-548am-5p | 2796 | 3817 | discovered in B- | | |
| | | | cells | | |
| hsa-miR-548an | 2797 | 3818 | discovered in B- | | |
| | | | cells | | |
| hsa-miR-548ao-3p | 2798 | 3819 | | | |
| hsa-miR-548ao-5p | 2799 | 3820 | | | |
| hsa-miR-548ap-3p | 2800 | 3821 | | | |
| hsa-miR-548ap-5p | 2801 | 3822 | | | |
| hsa-miR-548aq-3p | 2802 | 3823 | | | |
| hsa-miR-548aq-5p | 2803 | 3824 | | | |
| hsa-miR-548ar-3p | 2804 | 3825 | | | |
| hsa-miR-548ar-5p | 2805 | 3826 | | | |
| hsa-miR-548as-3p | 2806 | 3827 | | | |
| hsa-miR-548as-5p | 2807 | 3828 | | | |
| hsa-miR-548at-3p | 2808 | 3829 | | prostate cancer | |
| hsa-miR-548at-5p | 2809 | 3830 | | prostate cancer | |
| hsa-miR-548au-3p | 2810 | 3831 | | | |
| hsa-miR-548au-5p | 2811 | 3832 | | | |
| hsa-miR-548av-3p | 2812 | 3833 | | | |
| hsa-miR-548av-5p | 2813 | 3834 | | | |
| hsa-miR-548aw | 2814 | 3835 | | prostate cancer | |
| hsa-miR-548ay-3p | 2815 | 3836 | discovered in | | |
| | | | abnormal skin | | |
| | | | (psoriasis) | | |
| hsa-miR-548ay-5p | 2816 | 3837 | discovered in | | |
| | | | abnormal skin | | |
| | | | (psoriasis) | | |
| hsa-miR-548az-3p | 2817 | 3838 | discovered in | | |
| | | | abnormal skin | | |
| | | | (psoriasis) | | |
| hsa-miR-548az-5p | 2818 | 3839 | discovered in | | |
| | | | abnormal skin | | |
| | | | (psoriasis) | | |
| hsa-miR-548b-3p | 2819 | 3840 | identified in | | |
| | | | colorectal | | |
| | | | microRNAome | | |
| hsa-miR-548b-5p | 2820 | 3841 | immune cells, | | |
| | | | frontal cortex | | |
| hsa-miR-548c-3p | 2821 | 3842 | identified in | | |
| | | | colorectal | | |
| | | | microRNAome | | |
| hsa-miR-548c-5p | 2822 | 3843 | immune cells, | | |
| | | | frontal cortex | | |
| hsa-miR-548d-3p | 2823 | 3844 | identified in | | |
| | | | colorectal | | |
| | | | microRNAome | | |
| hsa-miR-548d-5p | 2824 | 3845 | identified in | | |
| | | | colorectal | | |
| | | | microRNAome | | |
| hsa-miR-548e | 2825 | 3846 | embryonic stem | | |
| | | | cells | | |
| hsa-miR-548f | 2826 | 3847 | embryonic stem | | |
| | | | cells | | |
| hsa-miR-548g-3p | 2827 | 3848 | embryonic stem | | |
| | | | cells | | |
| hsa-miR-548g-5p | 2828 | 3849 | embryonic stem | | |
| | | | cells | | |
| hsa-miR-548h-3p | 2829 | 3850 | embryonic stem | | |
| | | | cells | | |
| hsa-miR-548h-5p | 2830 | 3851 | embryonic stem | | |
| | | | cells | | |
| hsa-miR-548i | 2831 | 3852 | embryonic stem | | |
| | | | cells, immune cells | | |
| hsa-miR-548j | 2832 | 3853 | immune cells | | |
| hsa-miR-548k | 2833 | 3854 | embryonic stem | | |
| | | | cells | | |
| hsa-miR-548l | 2834 | 3855 | embryonic stem | | |
| | | | cells | | |
| hsa-miR-548m | 2835 | 3856 | embryonic stem | | |
| | | | cells | | |
| hsa-miR-548n | 2836 | 3857 | embryonic stem | | |
| | | | cells, immune cells | | |
| hsa-miR-548o-3p | 2837 | 3858 | embryonic stem | | |
| | | | cells | | |
| hsa-miR-548o-5p | 2838 | 3859 | embryonic stem | | |
| | | | cells | | |
| hsa-miR-548p | 2839 | 3860 | embryonic stem | | |
| | | | cells | | |
| hsa-miR-548q | 2840 | 3861 | | ovarian cancer | |
| | | | | cells | |
| hsa-miR-548s | 2841 | 3862 | discovered in the | | |
| | | | melanoma | | |
| | | | MicroRNAome | | |
| hsa-miR-548t-3p | 2842 | 3863 | discovered in the | | |
| | | | melanoma | | |
| | | | MicroRNAome | | |
| hsa-miR-548t-5p | 2843 | 3864 | discovered in the | | |
| | | | melanoma | | |
| | | | MicroRNAome | | |
| hsa-miR-548u | 2844 | 3865 | discovered in the | | |
| | | | melanoma | | |
| | | | MicroRNAome | | |
| hsa-miR-548w | 2845 | 3866 | discovered in the | | |
| | | | melanoma | | |
| | | | MicroRNAome | | |
| hsa-miR-548y | 2846 | 3867 | / | | |
| hsa-miR-548z | 2847 | 3868 | discovered in | | |
| | | | cervical tumor | | |
| hsa-miR-549a | 2848 | 3869 | discovered in a | | |
| | | | colorectal | | |
| | | | MicroRNAome | | |
| hsa-miR-550a-3-5p | 2849 | 3870 | | Hepatocellular | |
| | | | | Carcinoma | |
| hsa-miR-550a-3p | 2850 | 3871 | | Hepatocellular | |
| | | | | Carcinoma | |
| hsa-miR-550a-5p | 2851 | 3872 | | Hepatocellular | |
| | | | | Carcinoma | |
| hsa-miR-550b-2-5p | 2852 | 3873 | discovered in | | |
| | | | cervical tumor | | |
| hsa-miR-550b-3p | 2853 | 3874 | discovered in | | |
| | | | cervical tumor | | |
| hsa-miR-551a | 2854 | 3875 | | gastric cancer | |
| hsa-miR-551b-3p | 2855 | 3876 | hepatocytes | | |
| hsa-miR-551b-5p | 2856 | 3877 | hepatocytes | | |
| hsa-miR-552 | 2857 | 3878 | discovered in a | | |
| | | | colorectal | | |
| | | | MicroRNAome | | |
| hsa-miR-553 | 2858 | 3879 | discovered in a | | |
| | | | colorectal | | |
| | | | MicroRNAome | | |
| hsa-miR-554 | 2859 | 3880 | discovered in a | | |
| | | | colorectal | | |
| | | | MicroRNAome | | |
| hsa-miR-555 | 2860 | 3881 | discovered in a | | |
| | | | colorectal | | |
| | | | MicroRNAome | | |
| hsa-miR-556-3p | 2861 | 3882 | discovered in a | | |
| | | | colorectal | | |
| | | | MicroRNAome | | |
| hsa-miR-556-5p | 2862 | 3883 | discovered in a | | |
| | | | colorectal | | |
| | | | MicroRNAome | | |
| hsa-miR-557 | 2863 | 3884 | liver(hepatocytes) | | |
| hsa-miR-5571-3p | 2864 | 3885 | discoveredd in | | |
| | | | Salivary gland | | |
| hsa-miR-5571-5p | 2865 | 3886 | discoveredd in | | |
| | | | Salivary gland | | |
| hsa-miR-5572 | 2866 | 3887 | discoveredd in | | |
| | | | Salivary gland | | |
| hsa-miR-5579-3p | 2867 | 3888 | | | |
| hsa-miR-5579-5p | 2868 | 3889 | | | |
| hsa-miR-558 | 2869 | 3890 | | neuroblastoma | |
| hsa-miR-5580-3p | 2870 | 3891 | | | |
| hsa-miR-5580-5p | 2871 | 3892 | | | |
| hsa-miR-5581-3p | 2872 | 3893 | | | |
| hsa-miR-5581-5p | 2873 | 3894 | | | |
| hsa-miR-5582-3p | 2874 | 3895 | | | |
| hsa-miR-5582-5p | 2875 | 3896 | | | |
| hsa-miR-5583-3p | 2876 | 3897 | | | |
| hsa-miR-5583-5p | 2877 | 3898 | | | |
| hsa-miR-5584-3p | 2878 | 3899 | | | |
| hsa-miR-5584-5p | 2879 | 3900 | | | |
| hsa-miR-5585-3p | 2880 | 3901 | | | |
| hsa-miR-5585-5p | 2881 | 3902 | | | |
| hsa-miR-5586-3p | 2882 | 3903 | | | |
| hsa-miR-5586-5p | 2883 | 3904 | | | |
| hsa-miR-5587-3p | 2884 | 3905 | | | |
| hsa-miR-5587-5p | 2885 | 3906 | | | |
| hsa-miR-5588-3p | 2886 | 3907 | | | |
| hsa-miR-5588-5p | 2887 | 3908 | | | |
| hsa-miR-5589-3p | 2888 | 3909 | | | |
| hsa-miR-5589-5p | 2889 | 3910 | | | |
| hsa-miR-559 | 2890 | 3911 | | | |
| hsa-miR-5590-3p | 2891 | 3912 | | | |
| hsa-miR-5590-5p | 2892 | 3913 | | | |
| hsa-miR-5591-3p | 2893 | 3914 | | | |
| hsa-miR-5591-5p | 2894 | 3915 | | | |
| hsa-miR-561-3p | 2895 | 3916 | | multiple myeloma | |
| hsa-miR-561-5p | 2896 | 3917 | | multiple myeloma | |
| hsa-miR-562 | 2897 | 3918 | | | |
| hsa-miR-563 | 2898 | 3919 | discovered in a | | |
| | | | colorectal | | |
| | | | MicroRNAome | | |
| hsa-miR-564 | 2899 | 3920 | | Chronic myeloid | |
| | | | | leukemia | |
| hsa-miR-566 | 2900 | 3921 | | MALT | |
| | | | | lymphoma/ | |
| | | | | lymphocyte | |
| hsa-miR-567 | 2901 | 3922 | | colorectal cancer | |
| hsa-miR-568 | 2902 | 3923 | discovered in a | | |
| | | | colorectal | | |
| | | | MicroRNAome | | |
| hsa-miR-5680 | 2903 | 3924 | | Associated with | |
| | | | | metastatic prostate | |
| | | | | cancer | |
| hsa-miR-5681a | 2904 | 3925 | | Associated with | |
| | | | | metastatic prostate | |
| | | | | cancer | |
| hsa-miR-5681b | 2905 | 3926 | | Associated with | |
| | | | | metastatic prostate | |
| | | | | cancer | |
| hsa-miR-5682 | 2906 | 3927 | | Associated with | |
| | | | | metastatic prostate | |
| | | | | cancer | |
| hsa-miR-5683 | 2907 | 3928 | | Associated with | |
| | | | | metastatic prostate | |
| | | | | cancer | |
| hsa-miR-5684 | 2908 | 3929 | | Associated with | |
| | | | | metastatic prostate | |
| | | | | cancer | |
| hsa-miR-5685 | 2909 | 3930 | | Associated with | |
| | | | | metastatic prostate | |
| | | | | cancer | |
| hsa-miR-5686 | 2910 | 3931 | | Associated with | |
| | | | | metastatic prostate | |
| | | | | cancer | |
| hsa-miR-5687 | 2911 | 3932 | | Associated with | |
| | | | | metastatic prostate | |
| | | | | cancer | |
| hsa-miR-5688 | 2912 | 3933 | | Associated with | |
| | | | | metastatic prostate | |
| | | | | cancer | |
| hsa-miR-5689 | 2913 | 3934 | | Associated with | |
| | | | | metastatic prostate | |
| | | | | cancer | |
| hsa-miR-569 | 2914 | 3935 | | | |
| hsa-miR-5690 | 2915 | 3936 | | Associated with | |
| | | | | metastatic prostate | |
| | | | | cancer | |
| hsa-miR-5691 | 2916 | 3937 | | Associated with | |
| | | | | metastatic prostate | |
| | | | | cancer | |
| hsa-miR-5692a | 2917 | 3938 | | Associated with | |
| | | | | metastatic prostate | |
| | | | | cancer | |
| hsa-miR-5692b | 2918 | 3939 | | Associated with | |
| | | | | metastatic prostate | |
| | | | | cancer | |
| hsa-miR-5692c | 2919 | 3940 | | Associated with | |
| | | | | metastatic prostate | |
| | | | | cancer | |
| hsa-miR-5693 | 2920 | 3941 | | Associated with | |
| | | | | metastatic prostate | |
| | | | | cancer | |
| hsa-miR-5694 | 2921 | 3942 | | Associated with | |
| | | | | metastatic prostate | |
| | | | | cancer | |
| hsa-miR-5695 | 2922 | 3943 | | Associated with | |
| | | | | metastatic prostate | |
| | | | | cancer | |
| hsa-miR-5696 | 2923 | 3944 | | Associated with | |
| | | | | metastatic prostate | |
| | | | | cancer | |
| hsa-miR-5697 | 2924 | 3945 | | Associated with | |
| | | | | metastatic prostate | |
| | | | | cancer | |
| hsa-miR-5698 | 2925 | 3946 | | Associated with | |
| | | | | metastatic prostate | |
| | | | | cancer | |
| hsa-miR-5699 | 2926 | 3947 | | Associated with | |
| | | | | metastatic prostate | |
| | | | | cancer | |
| hsa-miR-5700 | 2927 | 3948 | | Associated with | |
| | | | | metastatic prostate | |
| | | | | cancer | |
| hsa-miR-5701 | 2928 | 3949 | | Associated with | |
| | | | | metastatic prostate | |
| | | | | cancer | |
| hsa-miR-5702 | 2929 | 3950 | | Associated with | |
| | | | | metastatic prostate | |
| | | | | cancer | |
| hsa-miR-5703 | 2930 | 3951 | | Associated with | |
| | | | | metastatic prostate | |
| | | | | cancer | |
| hsa-miR-570-3p | 2931 | 3952 | | follicular | |
| | | | | lymphoma | |
| hsa-miR-5704 | 2932 | 3953 | | Associated with | |
| | | | | metastatic prostate | |
| | | | | cancer | |
| hsa-miR-5705 | 2933 | 3954 | | Associated with | |
| | | | | metastatic prostate | |
| | | | | cancer | |
| hsa-miR-570-5p | 2934 | 3955 | | follicular | |
| | | | | lymphoma | |
| hsa-miR-5706 | 2935 | 3956 | | Associated with | |
| | | | | metastatic prostate | |
| | | | | cancer | |
| hsa-miR-5707 | 2936 | 3957 | | Associated with | |
| | | | | metastatic prostate | |
| | | | | cancer | |
| hsa-miR-5708 | 2937 | 3958 | | Associated with | |
| | | | | metastatic prostate | |
| | | | | cancer | |
| hsa-miR-571 | 2938 | 3959 | frontal cortex | | |
| hsa-miR-572 | 2939 | 3960 | circulating | basal cell | |
| | | | microRNA (in | carcinoma | |
| | | | plasma) | | |
| hsa-miR-573 | 2940 | 3961 | discovered in the | | |
| | | | colorectal | | |
| | | | MicroRNAome | | |
| hsa-miR-5739 | 2941 | 3962 | endothelial cells | | |
| hsa-miR-574-3p | 2942 | 3963 | blood (myeloid | follicular | |
| | | | cells) | lymphoma | |
| hsa-miR-574-5p | 2943 | 3964 | semen | | |
| hsa-miR-575 | 2944 | 3965 | | gastric cancer | |
| hsa-miR-576-3p | 2945 | 3966 | discovered in a | | |
| | | | colorectal | | |
| | | | MicroRNAome | | |
| hsa-miR-576-5p | 2946 | 3967 | cartilage/ | | |
| | | | chondrocyte | | |
| hsa-miR-577 | 2947 | 3968 | discovered in a | | |
| | | | colorectal | | |
| | | | MicroRNAome | | |
| hsa-miR-578 | 2948 | 3969 | discovered in a | | |
| | | | colorectal | | |
| | | | MicroRNAome | | |
| hsa-miR-5787 | 2949 | 3970 | fibroblast | | |
| hsa-miR-579 | 2950 | 3971 | | | |
| hsa-miR-580 | 2951 | 3972 | | breast cancer | |
| hsa-miR-581 | 2952 | 3973 | liver(hepatocytes) | | |
| hsa-miR-582-3p | 2953 | 3974 | cartilage/ | bladder cancer | |
| | | | chondrocyte | | |
| hsa-miR-582-5p | 2954 | 3975 | | bladder cancer | |
| hsa-miR-583 | 2955 | 3976 | | rectal cancer cells | |
| hsa-miR-584-3p | 2956 | 3977 | | tumor cells | |
| | | | | (follicular | |
| | | | | lymphoma, rectal | |
| | | | | cancer cells) | |
| hsa-miR-584-5p | 2957 | 3978 | | tumor cells | |
| | | | | (follicular | |
| | | | | lymphoma, rectal | |
| | | | | cancer cells) | |
| hsa-miR-585 | 2958 | 3979 | | oral squamous cell | |
| | | | | carcinoma | |
| hsa-miR-586 | 2959 | 3980 | discovered in a | | |
| | | | colorectal | | |
| | | | MicroRNAome | | |
| hsa-miR-587 | 2960 | 3981 | discovered in a | | |
| | | | colorectal | | |
| | | | MicroRNAome | | |
| hsa-miR-588 | 2961 | 3982 | discovered in a | | |
| | | | colorectal | | |
| | | | MicroRNAome | | |
| hsa-miR-589-3p | 2962 | 3983 | mesothelial cells | | |
| hsa-miR-589-5p | 2963 | 3984 | mesothelial cells | | |
| hsa-miR-590-3p | 2964 | 3985 | cardiomyocytes | | Cell cycle |
| | | | | | progression |
| hsa-miR-590-5p | 2965 | 3986 | cardiomyocytes | | Cell cycle |
| | | | | | progression |
| hsa-miR-591 | 2966 | 3987 | | neuroblastoma | |
| hsa-miR-592 | 2967 | 3988 | | hepatocellular | |
| | | | | carcinoma | |
| hsa-miR-593-3p | 2968 | 3989 | | esophageal cancer | |
| hsa-miR-593-5p | 2969 | 3990 | | esophageal cancer | |
| hsa-miR-595 | 2970 | 3991 | | heart failure | |
| hsa-miR-596 | 2971 | 3992 | | ependymoma, | |
| | | | | cancers | |
| hsa-miR-597 | 2972 | 3993 | discovered in a | | |
| | | | colorectal | | |
| | | | MicroRNAome | | |
| hsa-miR-598 | 2973 | 3994 | Blood | | |
| | | | (lymphocytes) | | |
| hsa-miR-599 | 2974 | 3995 | | Multiple sclerosis | |
| hsa-miR-600 | 2975 | 3996 | discovered in a | | |
| | | | colorectal | | |
| | | | MicroRNAome | | |
| hsa-miR-601 | 2976 | 3997 | | various cancers | |
| | | | | (colonrectal, | |
| | | | | gastric) | |
| hsa-miR-602 | 2977 | 3998 | oocyte | | |
| hsa-miR-603 | 2978 | 3999 | | | |
| hsa-miR-604 | 2979 | 4000 | discovered in a | | |
| | | | colorectal | | |
| | | | MicroRNAome | | |
| hsa-miR-605 | 2980 | 4001 | discovered in a | | |
| | | | colorectal | | |
| | | | MicroRNAome | | |
| hsa-miR-606 | 2981 | 4002 | discovered in a | | |
| | | | colorectal | | |
| | | | MicroRNAome | | |
| hsa-miR-6068 | 2982 | 4003 | discovered in | | |
| | | | endothelial cells | | |
| hsa-miR-6069 | 2983 | 4004 | discovered in | | |
| | | | endothelial cells | | |
| hsa-miR-607 | 2984 | 4005 | discovered in a | | |
| | | | colorectal | | |
| | | | MicroRNAome | | |
| hsa-miR-6070 | 2985 | 4006 | discovered in a | | |
| | | | colorectal | | |
| | | | MicroRNAome | | |
| hsa-miR-6071 | 2986 | 4007 | discovered in | | |
| | | | endothelial cells | | |
| hsa-miR-6072 | 2987 | 4008 | discovered in | | |
| | | | endothelial cells | | |
| hsa-miR-6073 | 2988 | 4009 | discovered in | | |
| | | | endothelial cells | | |
| hsa-miR-6074 | 2989 | 4010 | discovered in | | |
| | | | endothelial cells | | |
| hsa-miR-6075 | 2990 | 4011 | discovered in | | |
| | | | endothelial cells | | |
| hsa-miR-6076 | 2991 | 4012 | discovered in | | |
| | | | endothelial cells | | |
| hsa-miR-6077 | 2992 | 4013 | discovered in | | |
| | | | endothelial cells | | |
| hsa-miR-6078 | 2993 | 4014 | discovered in | | |
| | | | endothelial cells | | |
| hsa-miR-6079 | 2994 | 4015 | discovered in | | |
| | | | endothelial cells | | |
| hsa-miR-608 | 2995 | 4016 | | various cancers | |
| hsa-miR-6080 | 2996 | 4017 | discovered in | | |
| | | | endothelial cells | | |
| hsa-miR-6081 | 2997 | 4018 | discovered in | | |
| | | | endothelial cells | | |
| hsa-miR-6082 | 2998 | 4019 | discovered in | | |
| | | | endothelial cells | | |
| hsa-miR-6083 | 2999 | 4020 | discovered in | | |
| | | | endothelial cells | | |
| hsa-miR-6084 | 3000 | 4021 | discovered in | | |
| | | | endothelial cells | | |
| hsa-miR-6085 | 3001 | 4022 | discovered in | | |
| | | | endothelial cells | | |
| hsa-miR-6086 | 3002 | 4023 | embryonic stem | | |
| | | | cells | | |
| hsa-miR-6087 | 3003 | 4024 | embryonic stem | | |
| | | | cells | | |
| hsa-miR-6088 | 3004 | 4025 | embryonic stem | | |
| | | | cells | | |
| hsa-miR-6089 | 3005 | 4026 | embryonic stem | | |
| | | | cells | | |
| hsa-miR-609 | 3006 | 4027 | discovered in a | | |
| | | | colorectal | | |
| | | | MicroRNAome | | |
| hsa-miR-6090 | 3007 | 4028 | embryonic stem | | |
| | | | cells | | |
| hsa-miR-610 | 3008 | 4029 | | gastric cancer | |
| hsa-miR-611 | 3009 | 4030 | | Renal cell | |
| | | | | carcinoma | |
| hsa-miR-612 | 3010 | 4031 | | AM leukemia | |
| hsa-miR-6124 | 3011 | 4032 | | | |
| hsa-miR-6125 | 3012 | 4033 | | | |
| hsa-miR-6126 | 3013 | 4034 | | | |
| hsa-miR-6127 | 3014 | 4035 | | | |
| hsa-miR-6128 | 3015 | 4036 | | | |
| hsa-miR-6129 | 3016 | 4037 | | | |
| hsa-miR-613 | 3017 | 4038 | lipid metabollism | | |
| hsa-miR-6130 | 3018 | 4039 | | | |
| hsa-miR-6131 | 3019 | 4040 | | | |
| hsa-miR-6132 | 3020 | 4041 | | | |
| hsa-miR-6133 | 3021 | 4042 | | | |
| hsa-miR-6134 | 3022 | 4043 | | | |
| hsa-miR-614 | 3023 | 4044 | circulating | | |
| | | | micrRNAs (in | | |
| | | | Plasma) | | |
| hsa-miR-615-3p | 3024 | 4045 | | | |
| hsa-miR-615-5p | 3025 | 4046 | | | |
| hsa-miR-616-3p | 3026 | 4047 | | prostate cancer | |
| hsa-miR-6165 | 3027 | 4048 | | | Pro-apoptotic |
| | | | | | factor |
| hsa-miR-616-5p | 3028 | 4049 | | prostate cancer | |
| hsa-miR-617 | 3029 | 4050 | | | |
| hsa-miR-618 | 3030 | 4051 | | | |
| hsa-miR-619 | 3031 | 4052 | discovered in a | | |
| | | | colorectal | | |
| | | | MicroRNAome | | |
| hsa-miR-620 | 3032 | 4053 | discovered in a | | |
| | | | colorectal | | |
| | | | MicroRNAome | | |
| hsa-miR-621 | 3033 | 4054 | | | |
| hsa-miR-622 | 3034 | 4055 | | | |
| hsa-miR-623 | 3035 | 4056 | | | |
| hsa-miR-624-3p | 3036 | 4057 | chondrocyte | | |
| hsa-miR-624-5p | 3037 | 4058 | chondrocyte | | |
| hsa-miR-625-3p | 3038 | 4059 | liver(hepatocytes), | various cancers | |
| | | | circulating (blood) | | |
| hsa-miR-625-5p | 3039 | 4060 | liver(hepatocytes), | various cancers | |
| | | | circulating (blood) | | |
| hsa-miR-626 | 3040 | 4061 | discovered in the | | |
| | | | colorectal | | |
| | | | MicroRNAome | | |
| hsa-miR-627 | 3041 | 4062 | | colorectal cancer | |
| hsa-miR-628-3p | 3042 | 4063 | | neuroblastoma | |
| hsa-miR-628-5p | 3043 | 4064 | | neuroblastoma | |
| hsa-miR-629-3p | 3044 | 4065 | | B-lineage ALL, T | |
| | | | | cell lupus, | |
| | | | | RCC/kidney | |
| hsa-miR-629-5p | 3045 | 4066 | | B-lineage ALL, T | |
| | | | | cell lupus, | |
| | | | | RCC/kidney | |
| hsa-miR-630 | 3046 | 4067 | chondrocytes | rectal cancer | |
| hsa-miR-631 | 3047 | 4068 | discovered in the | | |
| | | | colorectal | | |
| | | | MicroRNAom | | |
| hsa-miR-632 | 3048 | 4069 | | myelodysplastic | |
| | | | | syndromes | |
| hsa-miR-633 | 3049 | 4070 | | multiple sclerosis | |
| hsa-miR-634 | 3050 | 4071 | cartilage/ | | |
| | | | chondrocyte | | |
| hsa-miR-635 | 3051 | 4072 | discovered in the | | |
| | | | colorectal | | |
| | | | MicroRNAome | | |
| hsa-miR-636 | 3052 | 4073 | | myelodysplastic | |
| | | | | syndromes | |
| hsa-miR-637 | 3053 | 4074 | discovered in the | | |
| | | | colorectal | | |
| | | | MicroRNAome | | |
| hsa-miR-638 | 3054 | 4075 | | Lupus nephritis, | |
| | | | | basal cell | |
| | | | | carcinoma | |
| hsa-miR-639 | 3055 | 4076 | discovered in the | | |
| | | | colorectal | | |
| | | | MicroRNAome | | |
| hsa-miR-640 | 3056 | 4077 | | Chronic | |
| | | | | lymphocytic | |
| | | | | leukemia | |
| hsa-miR-641 | 3057 | 4078 | cartilage/ | | |
| | | | chondrocyte | | |
| hsa-miR-642a-3p | 3058 | 4079 | adipocyte | | |
| hsa-miR-642a-5p | 3059 | 4080 | discovered in the | | |
| | | | colorectal | | |
| | | | MicroRNAome | | |
| hsa-miR-642b-3p | 3060 | 4081 | discovered in a | | |
| | | | cervial tumo | | |
| hsa-miR-642b-5p | 3061 | 4082 | discovered in a | | |
| | | | cervial tumo | | |
| hsa-miR-643 | 3062 | 4083 | discovered in the | | |
| | | | colorectal | | |
| | | | MicroRNAome | | |
| hsa-miR-644a | 3063 | 4084 | | | |
| hsa-miR-645 | 3064 | 4085 | | ovarian cancer | |
| hsa-miR-646 | 3065 | 4086 | | | |
| hsa-miR-647 | 3066 | 4087 | | prostate and lung | |
| | | | | cancer | |
| hsa-miR-648 | 3067 | 4088 | circulating | | |
| | | | micrRNAs (in | | |
| | | | Plasma) | | |
| hsa-miR-649 | 3068 | 4089 | Serum | | |
| hsa-miR-6499-3p | 3069 | 4090 | discovered in | | |
| | | | abnormal skin | | |
| | | | (psoriasis) | | |
| hsa-miR-6499-5p | 3070 | 4091 | discovered in | | |
| | | | abnormal skin | | |
| | | | (psoriasis) | | |
| hsa-miR-650 | 3071 | 4092 | | melanoma | |
| hsa-miR-6500-3p | 3072 | 4093 | discovered in | | |
| | | | abnormal skin | | |
| | | | (psoriasis) | | |
| hsa-miR-6500-5p | 3073 | 4094 | discovered in | | |
| | | | abnormal skin | | |
| | | | (psoriasis) | | |
| hsa-miR-6501-3p | 3074 | 4095 | discovered in | | |
| | | | abnormal skin | | |
| | | | (psoriasis) | | |
| hsa-miR-6501-5p | 3075 | 4096 | discovered in | | |
| | | | abnormal skin | | |
| | | | (psoriasis) | | |
| hsa-miR-6502-3p | 3076 | 4097 | discovered in | | |
| | | | abnormal skin | | |
| | | | (psoriasis) | | |
| hsa-miR-6502-5p | 3077 | 4098 | discovered in | | |
| | | | abnormal skin | | |
| | | | (psoriasis) | | |
| hsa-miR-6503-3p | 3078 | 4099 | discovered in | | |
| | | | abnormal skin | | |
| | | | (psoriasis) | | |
| hsa-miR-6503-5p | 3079 | 4100 | discovered in | | |
| | | | abnormal skin | | |
| | | | (psoriasis) | | |
| hsa-miR-6504-3p | 3080 | 4101 | discovered in | | |
| | | | abnormal skin | | |
| | | | (psoriasis) | | |
| hsa-miR-6504-5p | 3081 | 4102 | discovered in | | |
| | | | abnormal skin | | |
| | | | (psoriasis) | | |
| hsa-miR-6505-3p | 3082 | 4103 | discovered in | | |
| | | | abnormal skin | | |
| | | | (psoriasis) | | |
| hsa-miR-6505-5p | 3083 | 4104 | discovered in | | |
| | | | abnormal skin | | |
| | | | (psoriasis) | | |
| hsa-miR-6506-3p | 3084 | 4105 | discovered in | | |
| | | | abnormal skin | | |
| | | | (psoriasis) | | |
| hsa-miR-6506-5p | 3085 | 4106 | discovered in | | |
| | | | abnormal skin | | |
| | | | (psoriasis) | | |
| hsa-miR-6507-3p | 3086 | 4107 | discovered in | | |
| | | | abnormal skin | | |
| | | | (psoriasis) | | |
| hsa-miR-6507-5p | 3087 | 4108 | discovered in | | |
| | | | abnormal skin | | |
| | | | (psoriasis) | | |
| hsa-miR-6508-3p | 3088 | 4109 | discovered in | | |
| | | | abnormal skin | | |
| | | | (psoriasis) | | |
| hsa-miR-6508-5p | 3089 | 4110 | discovered in | | |
| | | | abnormal skin | | |
| | | | (psoriasis) | | |
| hsa-miR-6509-3p | 3090 | 4111 | discovered in | | |
| | | | abnormal skin | | |
| | | | (psoriasis) | | |
| hsa-miR-6509-5p | 3091 | 4112 | discovered in | | |
| | | | abnormal skin | | |
| | | | (psoriasis) | | |
| hsa-miR-651 | 3092 | 4113 | discovered in the | lung cancer | |
| | | | colorectal | | |
| | | | MicroRNAome | | |
| hsa-miR-6510-3p | 3093 | 4114 | discovered in | | |
| | | | abnormal skin | | |
| | | | (psoriasis) | | |
| hsa-miR-6510-5p | 3094 | 4115 | discovered in | | |
| | | | abnormal skin | | |
| | | | (psoriasis) | | |
| hsa-miR-6511a-3p | 3095 | 4116 | discovered in | | |
| | | | abnormal skin | | |
| | | | (psoriasis) and | | |
| | | | epididymis | | |
| hsa-miR-6511a-5p | 3096 | 4117 | discovered in | | |
| | | | abnormal skin | | |
| | | | (psoriasis) and | | |
| | | | epididymis | | |
| hsa-miR-6511b-3p | 3097 | 4118 | discovered in | | |
| | | | epididymis | | |
| hsa-miR-6511b-5p | 3098 | 4119 | discovered in | | |
| | | | epididymis | | |
| hsa-miR-6512-3p | 3099 | 4120 | discovered in | | |
| | | | abnormal skin | | |
| | | | (psoriasis) | | |
| hsa-miR-6512-5p | 3100 | 4121 | discovered in | | |
| | | | abnormal skin | | |
| | | | (psoriasis) | | |
| hsa-miR-6513-3p | 3101 | 4122 | discovered in | | |
| | | | abnormal skin | | |
| | | | (psoriasis) | | |
| hsa-miR-6513-5p | 3102 | 4123 | discovered in | | |
| | | | abnormal skin | | |
| | | | (psoriasis) | | |
| hsa-miR-6514-3p | 3103 | 4124 | discovered in | | |
| | | | abnormal skin | | |
| | | | (psoriasis) | | |
| hsa-miR-6514-5p | 3104 | 4125 | discovered in | | |
| | | | abnormal skin | | |
| | | | (psoriasis) | | |
| hsa-miR-6515-3p | 3105 | 4126 | discovered in | | |
| | | | abnormal skin | | |
| | | | (psoriasis) and | | |
| | | | epididymis | | |
| hsa-miR-6515-5p | 3106 | 4127 | discovered in | | |
| | | | abnormal skin | | |
| | | | (psoriasis) and | | |
| | | | epididymis | | |
| hsa-miR-652-3p | 3107 | 4128 | | rectal cancer cells | |
| hsa-miR-652-5p | 3108 | 4129 | | rectal cancer cells | |
| hsa-miR-653 | 3109 | 4130 | Discovered in the | | |
| | | | colorectal | | |
| | | | MicroRNAome | | |
| hsa-miR-654-3p | 3110 | 4131 | Discovered in the | | |
| | | | colorectal | | |
| | | | MicroRNAome | | |
| hsa-miR-654-5p | 3111 | 4132 | bone marrow | prostate cancer | |
| hsa-miR-655 | 3112 | 4133 | | | |
| hsa-miR-656 | 3113 | 4134 | | various cancers | |
| hsa-miR-657 | 3114 | 4135 | oligodendrocytes | diabetes | |
| hsa-miR-658 | 3115 | 4136 | | gastric cancer | |
| hsa-miR-659-3p | 3116 | 4137 | myoblast | | |
| hsa-miR-659-5p | 3117 | 4138 | myoblast | | |
| hsa-miR-660-3p | 3118 | 4139 | myoblast | | |
| hsa-miR-660-5p | 3119 | 4140 | myoblast | | |
| hsa-miR-661 | 3120 | 4141 | | breast cancer | |
| hsa-miR-662 | 3121 | 4142 | endothelial | | |
| | | | progenitor cells, | | |
| | | | oocytes | | |
| hsa-miR-663a | 3122 | 4143 | | follicular | |
| | | | | lymphoma, Lupus | |
| | | | | nephritis | |
| hsa-miR-663b | 3123 | 4144 | | follicular | |
| | | | | lymphoma, Lupus | |
| | | | | nephritis | |
| hsa-miR-664a-3p | 3124 | 4145 | embryonic stem | | component of |
| | | | cells | | SnoRNAs |
| hsa-miR-664a-5p | 3125 | 4146 | embryonic stem | | component of |
| | | | cells | | SnoRNAs |
| hsa-miR-664b-3p | 3126 | 4147 | embryonic stem | | component of |
| | | | cells | | SnoRNAs |
| hsa-miR-664b-5p | 3127 | 4148 | embryonic stem | | component of |
| | | | cells | | SnoRNAs |
| hsa-miR-665 | 3128 | 4149 | | breast cancer | |
| hsa-miR-668 | 3129 | 4150 | keratinocytes | | senescence |
| hsa-miR-670 | 3130 | 4151 | | | |
| hsa-miR-671-3p | 3131 | 4152 | | | |
| hsa-miR-6715a-3p | 3132 | 4153 | discovered in | | |
| | | | epididymis | | |
| hsa-miR-6715b-3p | 3133 | 4154 | discovered in | | |
| | | | epididymis | | |
| hsa-miR-6715b-5p | 3134 | 4155 | discovered in | | |
| | | | epididymis | | |
| hsa-miR-671-5p | 3135 | 4156 | | rectal cancer, | |
| | | | | prolactinomas | |
| hsa-miR-6716-3p | 3136 | 4157 | discovered in | | |
| | | | epididymis | | |
| hsa-miR-6716-5p | 3137 | 4158 | discovered in | | |
| | | | epididymis | | |
| hsa-miR-6717-5p | 3138 | 4159 | discovered in | | |
| | | | epididymis | | |
| hsa-miR-6718-5p | 3139 | 4160 | discovered in | | |
| | | | epididymis | | |
| hsa-miR-6719-3p | 3140 | 4161 | discovered in | | |
| | | | epididymis | | |
| hsa-miR-6720-3p | 3141 | 4162 | discovered in | | |
| | | | epididymis | | |
| hsa-miR-6721-5p | 3142 | 4163 | discovered in | | |
| | | | epididymis | | |
| hsa-miR-6722-3p | 3143 | 4164 | discovered in | | |
| | | | epididymis | | |
| hsa-miR-6722-5p | 3144 | 4165 | discovered in | | |
| | | | epididymis | | |
| hsa-miR-6723-5p | 3145 | 4166 | discovered in | | |
| | | | epididymis | | |
| hsa-miR-6724-5p | 3146 | 4167 | discovered in | | |
| | | | epididymis | | |
| hsa-miR-675-3p | 3147 | 4168 | | adrenocortical | |
| | | | | tumor | |
| hsa-miR-675-5p | 3148 | 4169 | | adrenocortical | |
| | | | | tumor | |
| hsa-miR-676-3p | 3149 | 4170 | discovered in | | |
| | | | female | | |
| | | | reproductuve tract | | |
| hsa-miR-676-5p | 3150 | 4171 | discovered in | | |
| | | | female | | |
| | | | reproductuve tract | | |
| hsa-miR-708-3p | 3151 | 4172 | | Various cancers | |
| | | | | (lung, bladder, | |
| | | | | pancreatic, ALL) | |
| hsa-miR-708-5p | 3152 | 4173 | | Various cancers | |
| | | | | (lung, bladder, | |
| | | | | pancreatic, ALL) | |
| hsa-miR-711 | 3153 | 4174 | | cutaneous T-cell | |
| | | | | lymphomas | |
| hsa-miR-7-1-3p | 3154 | 4175 | Glioblast, brain, | | |
| | | | prancreas | | |
| hsa-miR-718 | 3155 | 4176 | blood | | |
| hsa-miR-7-2-3p | 3156 | 4177 | brain, pancreas | | |
| hsa-miR-744-3p | 3157 | 4178 | heart | | |
| hsa-miR-744-5p | 3158 | 4179 | embryonic stem | | |
| | | | cells, heart | | |
| hsa-miR-758-3p | 3159 | 4180 | cholesterol | | |
| | | | regulation and | | |
| | | | brain | | |
| hsa-miR-758-5p | 3160 | 4181 | cholesterol | | |
| | | | regulation and | | |
| | | | brain | | |
| hsa-miR-759 | 3161 | 4182 | | | |
| hsa-miR-7-5p | 3162 | 4183 | brain | | |
| hsa-miR-760 | 3163 | 4184 | | colonrectal and | |
| | | | | breast cancer | |
| hsa-miR-761 | 3164 | 4185 | | | |
| hsa-miR-762 | 3165 | 4186 | corneal epithelial | | |
| | | | cells | | |
| hsa-miR-764 | 3166 | 4187 | osteoblast | | |
| hsa-miR-765 | 3167 | 4188 | | rectal cancer | |
| hsa-miR-766-3p | 3168 | 4189 | embryonic stem | | |
| | | | cells | | |
| hsa-miR-766-5p | 3169 | 4190 | embryonic stem | | |
| | | | cells | | |
| hsa-miR-767-3p | 3170 | 4191 | | | |
| hsa-miR-767-5p | 3171 | 4192 | | | |
| hsa-miR-769-3p | 3172 | 4193 | | | |
| hsa-miR-769-5p | 3173 | 4194 | | | |
| hsa-miR-770-5p | 3174 | 4195 | | | |
| hsa-miR-802 | 3175 | 4196 | brain, epithelial | down symdrome | |
| | | | cells, hepatocytes | | |
| hsa-miR-873-3p | 3176 | 4197 | | | |
| hsa-miR-873-5p | 3177 | 4198 | | | |
| hsa-miR-874 | 3178 | 4199 | | cervical cancer, | |
| | | | | lung cancer, | |
| | | | | carcinoma | |
| hsa-miR-875-3p | 3179 | 4200 | | | |
| hsa-miR-875-5p | 3180 | 4201 | | | |
| hsa-miR-876-3p | 3181 | 4202 | | | |
| hsa-miR-876-5p | 3182 | 4203 | | | |
| hsa-miR-877-3p | 3183 | 4204 | | | |
| hsa-miR-877-5p | 3184 | 4205 | | | |
| hsa-miR-885-3p | 3185 | 4206 | embryonic stem | | |
| | | | cells | | |
| hsa-miR-885-5p | 3186 | 4207 | embryonic stem | | |
| | | | cells | | |
| hsa-miR-887 | 3187 | 4208 | | | |
| hsa-miR-888-3p | 3188 | 4209 | | | |
| hsa-miR-888-5p | 3189 | 4210 | | | |
| hsa-miR-889 | 3190 | 4211 | | | |
| hsa-miR-890 | 3191 | 4212 | epididymis | | |
| hsa-miR-891a | 3192 | 4213 | epididymis | osteosarcoma | |
| hsa-miR-891b | 3193 | 4214 | epididymis | | |
| hsa-miR-892a | 3194 | 4215 | epididymis | | |
| hsa-miR-892b | 3195 | 4216 | epididymis | | |
| hsa-miR-892c-3p | 3196 | 4217 | discovered in | | |
| | | | epididymis | | |
| hsa-miR-892c-5p | 3197 | 4218 | discovered in | | |
| | | | epididymis | | |
| hsa-miR-920 | 3198 | 4219 | human testis | | |
| hsa-miR-921 | 3199 | 4220 | human testis | muscle invasive | |
| | | | | bladder cancer | |
| hsa-miR-922 | 3200 | 4221 | human testis, | multiple sclerosis, | |
| | | | neuronal tissues | Alcoholic liver | |
| | | | | disease | |
| hsa-miR-924 | 3201 | 4222 | human testis | | |
| hsa-miR-92a-1-5p | 3202 | 4223 | endothelial cells | | |
| hsa-miR-92a-2-5p | 3203 | 4224 | endothelial cells | | |
| hsa-miR-92a-3p | 3204 | 4225 | endothelial cells, | | |
| | | | CNS | | |
| hsa-miR-92b-3p | 3205 | 4226 | endothelial cells, | | |
| | | | heart | | |
| hsa-miR-92b-5p | 3206 | 4227 | endothelial cells, | | |
| | | | heart | | |
| hsa-miR-933 | 3207 | 4228 | discovered in | | |
| | | | cervical cancer | | |
| hsa-miR-93-3p | 3208 | 4229 | embryonic stem | basal cell | |
| | | | cells | carcinoma | |
| hsa-miR-934 | 3209 | 4230 | discovered in | | |
| | | | cervical cancer | | |
| hsa-miR-935 | 3210 | 4231 | blood monoclear | energy | |
| | | | cells | metabolism/ | |
| | | | | obesity, | |
| | | | | medullablastoma/ | |
| | | | | neural stem cells | |
| hsa-miR-93-5p | 3211 | 4232 | embryonic stem | | |
| | | | cells | | |
| hsa-miR-936 | 3212 | 4233 | skin | | |
| hsa-miR-937-3p | 3213 | 4234 | | cervical cancer | |
| hsa-miR-937-5p | 3214 | 4235 | | cervical cancer | |
| hsa-miR-938 | 3215 | 4236 | | Various cancer | |
| | | | | cells | |
| hsa-miR-939-3p | 3216 | 4237 | hepatocytes | | |
| hsa-miR-939-5p | 3217 | 4238 | hepatocytes | | |
| hsa-miR-9-3p | 3218 | 4239 | brain | Cancers and brain | |
| | | | | diseases | |
| hsa-miR-940 | 3219 | 4240 | identified in | | |
| | | | Cervical cancer | | |
| hsa-miR-941 | 3220 | 4241 | Embryonic stem | | |
| | | | cells | | |
| hsa-miR-942 | 3221 | 4242 | | lung cancer | |
| hsa-miR-943 | 3222 | 4243 | identified in | | |
| | | | Cervical cancer | | |
| hsa-miR-944 | 3223 | 4244 | | various cancers | |
| | | | | (cervical, | |
| | | | | pancreatic, | |
| | | | | colonrectal) | |
| hsa-miR-95 | 3224 | 4245 | | various cancers | |
| | | | | (pancreatic, | |
| | | | | glioblastoma, | |
| | | | | colorectal etc) | |
| hsa-miR-9-5p | 3225 | 4246 | brain | Cancers and brain | |
| | | | | disease | |
| hsa-miR-96-3p | 3226 | 4247 | stem cells | various cancers | |
| | | | | (prostate, lymphoma, | |
| | | | | HCC, etc) and | |
| | | | | inflammation | |
| hsa-miR-96-5p | 3227 | 4248 | stem cells | various cancers | |
| | | | | (prostate, lymphoma, | |
| | | | | HCC, etc) and | |
| | | | | inflammation | |
| hsa-miR-98-3p | 3228 | 4249 | | various cancer | apoptosis |
| | | | | cells | |
| hsa-miR-98-5p | 3229 | 4250 | | various cancer | apoptosis |
| | | | | cells | |
| hsa-miR-99a-3p | 3230 | 4251 | hemapoietic cells | | |
| hsa-miR-99a-5p | 3231 | 4252 | hemapoietic cells | | |
| hsa-miR-99b-3p | 3232 | 4253 | hemapoietic cells, | | |
| | | | embryonic stem | | |
| | | | cells | | |
| hsa-miR-99b-5p | 3233 | 4254 | hemapoietic cells, | | |
| | | | embryonic stem | | |
| | | | cells | | |

[0351] MicroRNAs that are enriched in specific types of immune cells are listed in Table 13. Furthermore, novel miroRNAs are discovered in the immune cells in the art through micro-array hybridization and microtome analysis (Jima D D et al, Blood, 2010, 116:e118-e127; Vaz C et al., BMC Genomics, 2010, 11, 288, the content of each of which is incorporated herein by reference in its entirety). In Table 13, “HCC” represents hepatocellular carcinoma, “ALL” stands for acute lymphoblastsic leukemia and “CLL” stands for chrominc lymphocytic leukemia.

TABLE 13
microRNAs in immune cells

| | mir | BS | tissues/ | | biological |
|---|---|---|---|---|---|
| | SEQ | SEQ | cells with | associated | functions/ |
| microRNA | ID | ID | MicroRNAs | diseases | targets |
| hsa-let-7a-2-3p | 171 | 1192 | embryonic stem | inflammatory, | tumor suppressor, |
| | | | cells, lung, | various cancers | target to c-myc |
| | | | myeloid cells | (lung, cervical, | |
| | | | | breast, | |
| | | | | pancreatic, etc) | |
| hsa-let-7a-3p | 172 | 1193 | embryonic stem | inflammatory, | tumor |
| | | | cell, lung, | various cancers | suppressor, |
| | | | myeloid cells | (lung, cervical, | target to c-myc |
| | | | | breast, | |
| | | | | pancreatic, etc) | |
| hsa-let-7a-5p | 173 | 1194 | embryonic stem | inflammatory, | tumor |
| | | | cells, lung, | various cancers | suppressor, |
| | | | myeloid cells | (lung, cervical, | target to c-myc |
| | | | | breast, | |
| | | | | pancreatic, etc) | |
| hsa-let-7c | 176 | 1197 | dendritic cells | various cacners | tumor |
| | | | | (cervical, | suppressor |
| | | | | pancreatic, | apoptosis |
| | | | | lung, | (target |
| | | | | esopphageal, etc) | to BCL-xl) |
| hsa-let-7e-3p | 179 | 1200 | immune | various cancer | tumor |
| | | | cells | cells, | suppressor |
| | | | | autoimmunity | |
| | | | | TLR signal | |
| | | | | pathway in | |
| | | | | endotoxin | |
| | | | | tolerance | |
| hsa-let-7e-5p | 180 | 1201 | immune | associated with | tumor |
| | | | cells | various cancer | suppressor |
| | | | | cells | |
| hsa-let-7f-1-3p | 181 | 1202 | immune | associated with | tumor |
| | | | cells (T | various cancer | suppressor |
| | | | cells) | cells | |
| hsa-let-7f-2-3p | 182 | 1203 | immune | associated with | tumor |
| | | | cells (T | various cancer | suppressor |
| | | | cells) | cells | |
| hsa-let-7f-5p | 183 | 1204 | immune | associated with | tumor |
| | | | cells (T | various cancer | suppressor |
| | | | cells) | cells | |
| hsa-let-7g-3p | 184 | 1205 | hematopoietic | various cancer | tumor |
| | | | cells, adipose, | cells (lung, | suppressor |
| | | | smooth muscle | breast, etc) | (target to NFkB, |
| | | | cells | | LOX1 |
| hsa-let-7g-5p | 185 | 1206 | hematopoietic | various cancer | tumor |
| | | | cells, adipose, | cells (lung, | suppressor |
| | | | smooth muscle | breast, etc) | (target to NFkB, |
| | | | cells | | LOX1 |
| hsa-let-7i-3p | 186 | 1207 | immune | chronic | tumor |
| | | | cells | lymphocyte | suppressor |
| | | | | leukimia | |
| hsa-let-7i-5p | 187 | 1208 | immune | chronic | tumor |
| | | | cells | lymphocyte | suppressor |
| | | | | leukimia | |
| hsa-miR-10a-3p | 203 | 1224 | hematopoeitic | acute myeoid | oncogene, cell |
| | | | cells | leukemia | growth |
| hsa-miR-10a-5p | 204 | 1225 | hematopoietic | acute myeloid | oncogene, cell |
| | | | cells | leukemia | growth |
| hsa-miR-1184 | 214 | 1235 | Hematopoietic | downregulated | predited in the |
| | | | cells | in oral | intron 22 of F8 |
| | | | | leukoplakia | gene |
| | | | | (OLK) | |
| hsa-miR-125b-1-3p | 279 | 1300 | hematopoietic | various cancer | oncogene, cell |
| | | | cells | (ALL, prostate, | differentiation |
| | | | (monocytes), | HCC, etc); TLR | |
| | | | brain (neuron) | signal pathway | |
| | | | | in endotoxin | |
| | | | | tolerance | |
| hsa-miR-125b-2-3p | 280 | 1301 | hematopoietic | various cancer | oncogene cell |
| | | | cells | (ALL, prostate, | differentiation |
| | | | (monocytes), | HCC etc); TLR | |
| | | | brain (neuron) | signal pathway | |
| | | | | in endotoxin | |
| | | | | tolerance | |
| hsa-miR-125b-5p | 281 | 1302 | hematopoietic | various cancer | oncogene cell |
| | | | cells, | (Cutaneous T | differentiation |
| | | | (monocytes), | cell lymphomas, | |
| | | | brain (neuron) | prostate, HCC, | |
| | | | | etc); TLR signal | |
| | | | | pathway in | |
| | | | | endotoxin | |
| | | | | tolerance | |
| hsa-miR-1279 | 315 | 1336 | monocytes | | |
| hsa-miR-130a-3p | 353 | 1374 | lung, | various cancers | pro-angiogenic |
| | | | monocytes, | (basal cell | |
| | | | vascular | carcinoma, | |
| | | | endothelial | HCC, ovarian, | |
| | | | cells | etc), drug | |
| | | | | resistance | |
| hsa-miR-130a-5p | 354 | 1375 | lung, monocytes, | various cancers | pro-angiogenic |
| | | | vasscular | (basal cell | |
| | | | endothelial | carcinoma, | |
| | | | cells | HCC, ovarian, | |
| | | | | etc), drug | |
| | | | | resistance | |
| hsa-miR-132-3p | 360 | 1381 | brain (neuron), | | |
| | | | immune | | |
| | | | cells | | |
| hsa-miR-132-5p | 362 | 1383 | brain (neuron), | | |
| | | | immune | | |
| | | | cells | | |
| hsa-miR-142-3p | 383 | 1404 | meyloid cells, | | tumor |
| | | | hematopoiesis, | | suppressor, |
| | | | APC cells | | immune |
| | | | | | response |
| hsa-miR-142-5p | 384 | 1405 | meyloid cells, | | immune |
| | | | hematopoiesis, | | response |
| | | | APC cells | | |
| hsa-miR-143-5p | 386 | 1407 | vascular smooth | increased in | |
| | | | muscle, | serum after virus | |
| | | | T-cells | infection | |
| hsa-miR-146a-3p | 393 | 1414 | immune cells, | associated with | |
| | | | hematopoiesis, | CLL, TLR | |
| | | | cartilage, | signal pathway | |
| | | | | in endotoxin | |
| | | | | tolerance | |
| hsa-miR-146a-5p | 394 | 1415 | immune cells, | associated with | |
| | | | hematopoiesis, | CLL, TLR signal | |
| | | | cartilage, | pathway in | |
| | | | | endotoxin | |
| | | | | tolerance | |
| hsa-miR-146b-3p | 395 | 1416 | immune cells | cancers (thyroid | immune |
| | | | | carcimona) | response |
| hsa-miR-146b-5p | 396 | 1417 | embryoid | thyroid cancer, | tumor invation, |
| | | | body | associated with | migration |
| | | | cells | CLL | |
| hsa-miR-147a | 399 | 1420 | Macrophage | inflammatory | |
| | | | | response | |
| hsa-miR-147b | 400 | 1421 | Macrophage | inflammatory | |
| | | | | response | |
| hsa-miR-148a-3p | 401 | 1422 | hematopoietic | associated with | |
| | | | cells | CLL, T-lineage | |
| | | | | ALL | |
| hsa-miR-148a-5p | 402 | 1423 | hematopoietic | associated with | |
| | | | cells | CLL, T-lineage | |
| | | | | ALL | |
| hsa-miR-150-3p | 407 | 1428 | hematopoitic | circulating | |
| | | | cells | plasma (acute | |
| | | | (lymphoid) | myeloid | |
| | | | | leukemia) | |
| hsa-miR-150-5p | 408 | 1429 | hematopoitic | circulating | |
| | | | cells | plasma (acute | |
| | | | (lymphoid) | myeloid | |
| | | | | leukemia) | |
| hsa-miR-151b | 411 | 1432 | immune cells | | |
| | | | (B-cells) | | |
| hsa-miR-155-3p | 419 | 1440 | T/B cells, | associated with | |
| | | | monocytes, | CLL, TLR signal | |
| | | | breast | pathway in | |
| | | | | endotoxin | |
| | | | | tolerance; | |
| | | | | upregulated in | |
| | | | | B cell | |
| | | | | lymphoma (CLL) | |
| | | | | and other cancers | |
| | | | | (breast, lung, | |
| | | | | ovarian, cervical, | |
| | | | | colorectal, | |
| | | | | prostate) | |
| hsa-miR-155-5p | 420 | 1441 | T/B cells, | associated with | |
| | | | monocytes, | CLL, TLR signal | |
| | | | breast | pathway in | |
| | | | | endotoxin | |
| | | | | tolerance, | |
| | | | | upregulated | |
| | | | | in B cell | |
| | | | | lymphoma | |
| | | | | (CLL) and other | |
| | | | | cancers (breast, | |
| | | | | lung, ovarian, | |
| | | | | cervical, | |
| | | | | colorectal, | |
| | | | | prostate) | |
| hsa-miR-15a-3p | 422 | 1443 | blood, | chronic | |
| | | | lymphocyte, | lymphocytic | |
| | | | hematopoietic | leukemia | |
| | | | tissues (spleen) | | |
| hsa-miR-15a-5p | 423 | 1444 | blood, | chronic | |
| | | | lymphocyte, | lymphocytic | |
| | | | hematopoietic | leukemia | |
| | | | tissues (spleen) | | |
| hsa-miR-15b-3p | 424 | 1445 | blood, | | cell cycle, |
| | | | lymphocyte, | | proliferation |
| | | | hematopoietic | | |
| | | | tissues (spleen) | | |
| hsa-miR-15b-5p | 425 | 1446 | blood, | | cell cycle, |
| | | | lymphocyte, | | proliferation |
| | | | hematopoietic | | |
| | | | tissues (spleen) | | |
| hsa-miR-16-1-3p | 426 | 1447 | embryonic stem | chronic | |
| | | | cells, blood, | lymphocytic | |
| | | | hematopoietic | leukemia | |
| | | | tissues (spleen) | | |
| hsa-miR-16-2-3p | 427 | 1448 | blood, | | |
| | | | lymphocyte, | | |
| | | | hematopoietic | | |
| | | | tissues (spleen) | | |
| hsa-miR-16-5p | 428 | 1449 | blood, | | |
| | | | hsa-miR-16-5p | | |
| | | | lymphocyte, | | |
| | | | hematopoietic | | |
| | | | tissues | | |
| hsa-miR-181a-3p | 432 | 1453 | glioblast, | | |
| | | | myeloid cells, | | |
| | | | Embryonic | | |
| | | | stem cells | | |
| hsa-miR-181a-5p | 433 | 1454 | glioblast, | | |
| | | | myeloid cells, | | |
| | | | Embryonic | | |
| | | | stem cells | | |
| hsa-miR-182-3p | 439 | 1460 | immune cells | colonrectal | immune |
| | | | | cancer, | response |
| | | | | autoimmne | |
| hsa-miR-182-5p | 441 | 1462 | lung, | autoimmune | immune |
| | | | immune | | response |
| | | | cells | | |
| hsa-miR-197-3p | 490 | 1511 | blood | various cancers | |
| | | | (myeloid), | (thyroid tumor, | |
| | | | other tissues | leukemia, etc) | |
| hsa-miR-197-5p | 491 | 1512 | blood (myeloid), | various cancers | |
| | | | other tissues | (thyroid tumor, | |
| | | | | leukemia, etc) | |
| hsa-miR-21-3p | 542 | 1563 | glioblast, Blood | autoimmune, | |
| | | | (meyloid cells), | heart diseases, | |
| | | | liver, vascular | cancers | |
| | | | endothelial | | |
| | | | cells | | |
| hsa-miR-214-3p | 543 | 1564 | immune | varioua cancers | immune |
| | | | cells, | (melanoma, | response |
| | | | pancreas | pancreatic, | |
| | | | | ovarian) | |
| hsa-miR-214-5p | 544 | 1565 | immune | varioua cancers | immune |
| | | | cells, | (melanoma, | response |
| | | | pancreas | pancreatic, | |
| | | | | ovarian) | |
| hsa-miR-21-5p | 546 | 1567 | blood | autoimmune, | |
| | | | (myeloid | heart diseases, | |
| | | | cells), liver, | cancers | |
| | | | endothelial | | |
| | | | cells | | |
| hsa-miR-221-3p | 557 | 1578 | endothelial | breast cancer, | angiogenesis/ |
| | | | cells, | upregulated | vasculogenesis |
| | | | immune | in thyroid cell | |
| | | | cells | transformation | |
| | | | | induced by | |
| | | | | HMGA1, TLR | |
| | | | | signal pathway | |
| | | | | in endotoxin | |
| | | | | tolerance, | |
| | | | | upregulated | |
| | | | | in T cell ALL | |
| hsa-miR-221-5p | 558 | 1579 | endothelial | breast cancer, | angiogenesis/ |
| | | | cells, | upregulated | vasculogenesis |
| | | | immune | in thyroid cell | |
| | | | cells | transformation | |
| | | | | induced by | |
| | | | | HMGA1, TLR | |
| | | | | signal pathway | |
| | | | | in endotoxin | |
| | | | | tolerance, | |
| | | | | upregulated | |
| | | | | in T cell ALL | |
| hsa-miR-223-3p | 561 | 1582 | meyloid cells | associated | |
| | | | | with CLL | |
| hsa-miR-223-5p | 562 | 1583 | meyloid cells | associated | |
| | | | | with CLL | |
| hsa-miR-23b-3p | 576 | 1597 | blood, myeloid | cancers (renal | |
| | | | cells | cancer, | |
| | | | | glioblastoma, | |
| | | | | prostate, etc) and | |
| | | | | autoimmune | |
| hsa-miR-23b-5p | 577 | 1598 | blood, myeloid | cancers | |
| | | | cells | (glioblastoma, | |
| | | | | prostate, etc) | |
| | | | | and | |
| | | | | autoimmune | |
| hsa-miR-24-1-5p | 579 | 1600 | lung, myeloid | | |
| | | | cells | | |
| hsa-miR-24-2-5p | 580 | 1601 | lung, myeloid | | |
| | | | cells | | |
| hsa-miR-24-3p | 581 | 1602 | lung, myeloid | | |
| | | | cells | | |
| hsa-miR-26a-1-3p | 590 | 1611 | embryonic | chronic | cell cycle and |
| | | | stem | lymphocyte | differentiation |
| | | | cells, blood | leukemia and | |
| | | | (T cells) | other cancers | |
| hsa-miR-26a-2-3p | 591 | 1612 | blood (Tcells), | chronic | cell cycle and |
| | | | other tissues | lymphocyte | differentiation |
| | | | | leukemia and | |
| | | | | other cancers | |
| hsa-miR-26a-5p | 592 | 1613 | blood (Tcells), | chronic | cell cycle and |
| | | | other tissues | lymphocyte | differentiation |
| | | | | leukemia and | |
| | | | | other cancers | |
| hsa-miR-26b-3p | 593 | 1614 | hematopoietic | | |
| | | | cells | | |
| hsa-miR-26b-5p | 594 | 1615 | hematopoietic | | |
| | | | cells | | |
| hsa-miR-27a-3p | 595 | 1616 | myeloid cells | various cancer | |
| | | | | cells | |
| hsa-miR-27a-5p | 596 | 1617 | myeloid cells | various cancer | |
| | | | | cells | |
| hsa-miR-27b-3p | 597 | 1618 | myeloid cells, | various cancer | pro-angiogenic |
| | | | vascular | cells | |
| | | | endothelial cells | | |
| hsa-miR-28-3p | 599 | 1620 | blood (immune | B/T cell | |
| | | | cells) | lymphoma | |
| hsa-miR-28-5p | 600 | 1621 | blood (immune | B/T cell | |
| | | | cells) | lymphoma | |
| hsa-miR-2909 | 602 | 1623 | T-Lymphocytes | | |
| hsa-miR-29a-3p | 611 | 1632 | immuno | various cancers, | tumor |
| | | | system, | neurodegenative | suppression, |
| | | | colonrectun | disease | immune |
| | | | | | modulation |
| | | | | | (mir-29 |
| | | | | | family) |
| hsa-miR-29a-5p | 612 | 1633 | immuno | various cancers, | adaptive |
| | | | system, | neurodegenative | immunity |
| | | | colonrectun | disease | |
| hsa-miR-29b-1-5p | 613 | 1634 | immuno | associated with | adaptive |
| | | | system | CLL, other | immunity |
| | | | | cancers, | |
| | | | | neurodegenative | |
| | | | | disease | |
| hsa-miR-29b-2-5p | 614 | 1635 | immuno | associated with | adaptive |
| | | | system | CLL, other | immunity |
| | | | | cancers, | |
| hsa-miR-29b-3p | 615 | 1636 | immuno | associated with | adaptive |
| | | | system | CLL, other | immunity |
| | | | | cancers | |
| hsa-miR-29c-3p | 616 | 1637 | immuno | associated with | adaptive |
| | | | system | CLL, other | immunity |
| | | | | cancers | |
| hsa-miR-29c-5p | 617 | 1638 | immuno | associated with | adaptive |
| | | | system | CLL, other | immunity |
| | | | | cancers | |
| hsa-miR-30e-3p | 647 | 1668 | myeloid cells, | | |
| | | | glia cells | | |
| hsa-miR-30e-5p | 648 | 1669 | myeloid cells, | | |
| | | | glia cells | | |
| hsa-miR-331-5p | 793 | 1814 | lymphocytes | | |
| hsa-miR-339-3p | 800 | 1821 | immune cells | | |
| hsa-miR-339-5p | 801 | 1822 | immune | | |
| | | | cells | | |
| hsa-miR-345-3p | 810 | 1831 | hematopoietic | increased in | |
| | | | cells | follicular | |
| | | | | lymphoma | |
| | | | | (53), | |
| | | | | other cancers | |
| hsa-miR-345-5p | 811 | 1832 | hematopoietic | increased in | |
| | | | cells | follicular | |
| | | | | lymphoma | |
| | | | | (53) | |
| hsa-miR-346 | 812 | 1833 | immume cells | cancers and | |
| | | | | autoimmune | |
| hsa-miR-34a-3p | 813 | 1834 | breast, myeloid | gastric cancer, | tumor |
| | | | cells, ciliated | CLL, other | suppressor, |
| | | | epithelial cells | | p53 inducible |
| hsa-miR-34a-5p | 814 | 1835 | breast, myeloid | gastric cancer, | tumor |
| | | | cells, ciliated | CLL, other | suppressor, |
| | | | epithelial | | p53 |
| | | | cells | | inducible |
| hsa-miR-363-3p | 856 | 1877 | kidney stem cell, | | |
| | | | blood cells | | |
| hsa-miR-363-5p | 857 | 1878 | kidney stem cell, | | |
| | | | blood cells | | |
| hsa-miR-372 | 940 | 1961 | hematopoietic | | |
| | | | cells, lung, | | |
| | | | placental (blood) | | |
| hsa-miR-377-3p | 957 | 1978 | hematopoietic | | |
| | | | cells | | |
| hsa-miR-377-5p | 958 | 1979 | hematopoietic | | |
| | | | cells | | |
| hsa-miR-493-3p | 2610 | 3631 | myeloid cells, | | |
| | | | pancreas (islet) | | |
| hsa-miR-493-5p | 2611 | 3632 | myeloid cells, | | |
| | | | pancreas (islet) | | |
| hsa-miR-542-3p | 2769 | 3790 | monocytes | | targets to |
| | | | | | survivin, |
| | | | | | introduce |
| | | | | | growth |
| | | | | | arrest |
| hsa-miR-548b-5p | 2820 | 3841 | immune cells | | |
| | | | frontal cortex | | |
| hsa-miR-548c-5p | 2822 | 3843 | immune cells | | |
| | | | frontal cortex | | |
| hsa-miR-548i | 2831 | 3852 | embryonic stem | | |
| | | | cells (41), | | |
| | | | immune cells | | |
| hsa-miR-548j | 2832 | 3853 | immune cells | | |
| hsa-miR-548n | 2836 | 3857 | embryonic stem | | |
| | | | cells, immune | | |
| | | | cells | | |
| hsa-miR-574-3p | 2942 | 3963 | blood (myeloid | increased in | |
| | | | cells) | follicular | |
| | | | | lymphoma | |
| | | | | (53) | |
| hsa-miR-598 | 2973 | 3994 | in blood | | |
| | | | lymphocytes | | |
| | | | (PBL) | | |
| hsa-miR-935 | 3210 | 4231 | identified in | associated with | |
| | | | human cervical | energy | |
| | | | cancer | metabolism/ | |
| | | | blood | obesity, | |
| | | | mononuclear | medullablastoma/ | |
| | | | cells | neural stem cells | |
| hsa-miR-99a-3p | 3230 | 4251 | hemapoietic | | |
| | | | cells | | |
| hsa-miR-99a-5p | 3231 | 4252 | hemapoietic | | |
| | | | cells, plasma | | |
| | | | (exosome) | | |
| hsa-miR-99b-3p | 3232 | 4253 | hemapoietic | | |
| | | | cells, Embryonic | | |
| | | | stem cells, | | |
| hsa-miR-99b-5p | 3233 | 4254 | hemapoietic | | |
| | | | cells, Embryonic | | |
| | | | stem cells, | | |
| | | | plasma | | |
| | | | (exosome) | | |

### III. Modifications

[0352] Herein, in a nucleotide, nucleoside polynucleotide (such as the nucleic acids of the invention, e.g., modified RNA, modified nucleic acid molecule, modified RNAs, nucleic acid and modified nucleic acids), the terms “modification” or, as appropriate, “modified” refer to modification with respect to A, G, U or C ribonucleotides. Generally, herein, these terms are not intended to refer to the ribonucleotide modifications in naturally occurring 5′-terminal mRNA cap moieties. In a polypeptide, the term “modification” refers to a modification as compared to the canonical set of 20 amino acids.

[0353] The modifications may be various distinct modifications. In some embodiments, where the nucleic acids or modified RNA, the coding region, the flanking regions and/or the terminal regions may contain one, two, or more (optionally different) nucleoside or nucleotide modifications. In some embodiments, a modified nucleic acids or modified RNA introduced to a cell may exhibit reduced degradation in the cell, as compared to an unmodified nucleic acid or modified RNA.

[0354] The polynucleotide, primary construct, nucleic acids or modified RNA can include any useful modification, such as to the sugar, the nucleobase, or the internucleoside linkage (e.g. to a linking phosphate/to a phosphodiester linkage/to the phosphodiester backbone). One or more atoms of a pyrimidine nucleobase may be replaced or substituted with optionally substituted amino, optionally substituted thiol, optionally substituted alkyl (e.g., methyl or ethyl), or halo (e.g., chloro or fluoro). In certain embodiments, modifications (e.g., one or more modifications) are present in each of the sugar and the internucleoside linkage. Modifications according to the present invention may be modifications of ribonucleic acids (RNAs) to deoxyribonucleic acids (DNAs), e.g., the substitution of the 2′OH of the ribofuranysyl ring to 2′H, threose nucleic acids (TNAs), glycol nucleic acids (GNAs), peptide nucleic acids (PNAs), locked nucleic acids (LNAs) or hybrids thereof). Additional modifications are described herein.

[0355] As described herein, the polynucleotides, primary construct, nucleic acids or modified RNA of the invention do not substantially induce an innate immune response of a cell into which the polynucleotides, primary constructs, nucleic acids or modified RNA (e.g., mRNA) is introduced. Features of an induced innate immune response include 1) increased expression of pro-inflammatory cytokines, 2) activation of intracellular PRRs (RIG-I, MDA5, etc, and/or 3) termination or reduction in protein translation.

[0356] In certain embodiments, it may desirable for a modified nucleic acid molecule introduced into the cell to be degraded intracellulary. For example, degradation of a modified nucleic acid molecule may be preferable if precise timing of protein production is desired. Thus, in some embodiments, the invention provides a modified nucleic acid molecule containing a degradation domain, which is capable of being acted on in a directed manner within a cell. In another aspect, the present disclosure provides polynucleotides, primary constructs, nucleic acids or modified RNA comprising a nucleoside or nucleotide that can disrupt the binding of a major groove interacting, e.g. binding, partner with the polynucleotides, primary constructs, nucleic acids or modified RNA (e.g., where the modified nucleotide has decreased binding affinity to major groove interacting partner, as compared to an unmodified nucleotide).

[0357] The polynucleotides, primary constructs, nucleic acids or modified RNA can optionally include other agents (e.g., RNAi-inducing agents, RNAi agents, siRNAs, shRNAs, miRNAs, antisense RNAs, ribozymes, catalytic DNA, tRNA, RNAs that induce triple helix formation, aptamers, vectors, etc.). In some embodiments, the polynucleotides, primary constructs, nucleic acids or modified RNA may include one or more messenger RNAs (mRNAs) having one or more modified nucleoside or nucleotides (i.e., modified mRNA molecules). Details for these nucleic acids or modified RNA follow.

Modified mRNA Molecules

[0358] The polynucleotides, primary constructs, nucleic acids or modified RNA of the invention includes a first region of linked nucleosides encoding a polypeptide of interest, a first flanking region located at the 5′ terminus of the first region, and a second flanking region located at the 3′ terminus of the first region. The first region of linked nucleosides may be a translatable region.

[0359] In some embodiments, the polynucleotide, primary construct, or mmRNA (e.g., the first region, first flanking region, or second flanking region) includes n number of linked nucleosides having any base, sugar, backbone, building block or other structure or formula, including but not limited to those of Formulas I through IX or any substructures thereof as described in International Application PCT/US12/58519 filed Oct. 3, 2012 (Attorney Docket Number: M009.20), the contents of which are incorporated herein by reference in their entirety. Such structures include modifications to the sugar, nucleobase, internucleoside linkage, or combinations thereof.

[0360] Combinations of chemical modifications include those taught in including but not limited to those described in International Application PCT/US12/58519 filed Oct. 3, 2012 (Attorney Docket Number: M009.20), the contents of which are incorporated herein by reference in their entirety.

[0361] The synthesis of polynucleotides, primary constructs or mmRNA of the present invention may be according to the methods described in International Application PCT/US12/58519 filed Oct. 3, 2012 (Attorney Docket Number: M009.20), the contents of which are incorporated herein by reference in their entirety.

[0362] In some embodiments, the nucleobase selected from the group consisting of cytosine, guanine, adenine, and uracil.

[0363] In some embodiments, the modified nucleobase is a modified uracil. Exemplary nucleobases and nucleosides having a modified uracil include pseudouridine (ψ), pyridin-4-one ribonucleoside, 5-aza-uridine, 6-aza-uridine, 2-thio-5-aza-uridine, 2-thiouridine (s²U), 4-thio-uridine (s⁴U), 4-thio-pseudouridine, 2-thio-pseudouridine, 5-hydroxyuridine (ho⁵U), 5-aminoallyl-uridine, 5-halo-uridine (e.g., 5-iodo-uridineor 5-bromo-uridine), 3-methyluridine (m³U), 5-methoxy-uridine (mo⁵U), uridine 5-oxyacetic acid (cmo⁵U), uridine 5-oxyacetic acid methyl ester (mcmo⁵U), 5-carboxymethyl-uridine (cm⁵U), 1-carboxymethyl-pseudouridine, 5-carboxyhydroxymethyl-uridine (chm⁵U), 5-carboxyhydroxymethyl-uridine methyl ester (mchm⁵U), 5-methoxycarbonylmethyl-uridine (mcm⁵U), 5-methoxycarbonylmethyl-2-thio-uridine (mcm⁵s²U), 5-aminomethyl-2-thio-uridine (nm⁵s²U), 5-methylaminomethyl-uridine (mnm⁵U), 5-methylaminomethyl-2-thio-uridine (mnm⁵s²U), 5-methylaminomethyl-2-seleno-uridine (mnm⁵se²U), 5-carbamoylmethyl-uridine (ncm⁵U), 5-carboxymethylaminomethyl-uridine (cmnm⁵U), 5-carboxymethylaminomethyl-2-thio-uridine (cmnm⁵s²U), 5-propynyl-uridine, 1-propynyl-pseudouridine, 5-taurinomethyluridine (τm⁵U), 1-taurinomethyl-pseudouridine, 5-taurinomethyl-2-thio-uridine (τM⁵s²U), 1-taurinomethyl-4-thio-pseudouridine, 5-methyl-uridine (m⁵U, i.e., having the nucleobase deoxythymine), 1-methyl-pseudouridine (m¹ψ), 5-methyl-2-thio-uridine (m⁵s²U), 1-methyl-4-thio-pseudouridine (m¹s⁴W), 4-thio-1-methyl-pseudouridine, 3-methyl-pseudouridine (m³ψ), 2-thio-1-methyl-pseudouridine, 1-methyl-1-deaza-pseudouridine, 2-thio-1-methyl-1-deaza-pseudouridine, dihydrouridine (D), dihydropseudouridine, 5,6-dihydrouridine, 5-methyl-dihydrouridine (m⁵D), 2-thio-dihydrouridine, 2-thio-dihydropseudouridine, 2-methoxyuridine, 2-methoxy-4-thio-uridine, 4-methoxy-pseudouridine, 4-methoxy-2-thio-pseudouridine, N1-methyl-pseudouridine, 3-(3-amino-3-carboxypropyl)uridine (acp³U), 1-methyl-3-(3-amino-3-carboxypropyl)pseudouridine (acp³ψ), 5-(isopentenylaminomethyl)uridine (inm⁵U), 5-(isopentenylaminomethyl)-2-thio-uridine (inm⁵s²U), α-thio-uridine, 2′-O-methyl-uridine (Um), 5,2′-O-dimethyl-uridine (m⁵Um), 2′-O-methyl-pseudouridine (ψm), 2-thio-2′-O-methyl-uridine (s²Um), 5-methoxycarbonylmethyl-2′-O-methyl-uridine (mcm⁵Um), 5-carbamoylmethyl-2′-O-methyl-uridine (ncm⁵Um), 5-carboxymethylaminomethyl-2′-O-methyl-uridine (cmnm⁵Um), 3,2′-O-dimethyl-uridine (m³Um), and 5-(isopentenylaminomethyl)-2′-O-methyl-uridine (inm⁵Um), 1-thio-uridine, deoxythymidine, 2′-F-ara-uridine, 2′-F-uridine, 2′-OH-ara-uridine, 5-(2-carbomethoxyvinyl) uridine, and 5-[3-(1-E-propenylamino)uridine.

[0364] In some embodiments, the modified nucleobase is a modified cytosine. Exemplary nucleobases and nucleosides having a modified cytosine include 5-aza-cytidine, 6-aza-cytidine, pseudoisocytidine, 3-methyl-cytidine (m³C), N4-acetyl-cytidine (ac⁴C), 5-formylcytidine (f⁵C), N4-methylcytidine (m⁴C), 5-methyl-cytidine (m⁵C), 5-halo-cytidine (e.g., 5-iodo-cytidine), 5-hydroxymethylcytidine (hm⁵C), 1-methyl-pseudoisocytidine, pyrrolo-cytidine, pyrrolo-pseudoisocytidine, 2-thio-cytidine (s²C), 2-thio-5-methyl-cytidine, 4-thio-pseudoisocytidine, 4-thio-1-methyl-pseudoisocytidine, 4-thio-1-methyl-1-deaza-pseudoisocytidine, 1-methyl-1-deaza-pseudoisocytidine, zebularine, 5-aza-zebularine, 5-methyl-zebularine, 5-aza-2-thio-zebularine, 2-thio-zebularine, 2-methoxy-cytidine, 2-methoxy-5-methyl-cytidine, 4-methoxy-pseudoisocytidine, 4-methoxy-1-methyl-pseudoisocytidine, lysidine (k₂C), α-thio-cytidine, 2′-O-methyl-cytidine (Cm), 5,2′-O-dimethyl-cytidine (m⁵Cm), N4-acetyl-2′-O-methyl-cytidine (ac⁴Cm), N4,2′-O-dimethyl-cytidine (m⁴Cm), 5-formyl-2′-O-methyl-cytidine (f⁵Cm), N4,N4,2′-O-trimethyl-cytidine (m⁴2Cm), 1-thio-cytidine, 2′-F-ara-cytidine, 2′-F-cytidine, and 2′-OH-ara-cytidine.

[0365] In some embodiments, the modified nucleobase is a modified adenine. Exemplary nucleobases and nucleosides having a modified adenine include 2-aminopurine, 2,6-diaminopurine, 2-amino-6-halo-purine (e.g., 2-amino-6-chloro-purine), 6-halo-purine (e.g., 6-chloro-purine), 2-amino-6-methyl-purine, 8-azido-adenosine, 7-deaza-adenine, 7-deaza-8-aza-adenine, 7-deaza-2-amino-purine, 7-deaza-8-aza-2-amino-purine, 7-deaza-2,6-diaminopurine, 7-deaza-8-aza-2,6-diaminopurine, 1-methyladenosine (m¹A), 2-methyl-adenine (m²A), N6-methyladenosine (m⁶A), 2-methylthio-N6-methyl-adenosine (ms²m⁶A), N6-isopentenyladenosine (i⁶A), 2-methylthio-N6-isopentenyl-adenosine (ms²i⁶A), N6-(cis-hydroxyisopentenyl)adenosine (io⁶A), 2-methylthio-N6-(cis-hydroxyisopentenyl)adenosine (ms²io⁶A), N6-glycinylcarbamoyladenosine (g⁶A), N6-threonylcarbamoyladenosine (t⁶A), N6-methyl-N6-threonylcarbamoyl-adenosine (m⁶t⁶A), 2-methylthio-N6-threonyl carbamoyladenosine (ms²g⁶A), N6,N6-dimethyl-adenosine (m⁶₂A), N6-hydroxynorvalylcarbamoyl-adenosine (hn⁶A), 2-methylthio-N6-hydroxynorvalylcarbamoyl-adenosine (ms²hn⁶A), N6-acetyl-adenosine (ac⁶A), 7-methyladenine, 2-methylthio-adenine, 2-methoxy-adenine, α-thio-adenosine, 2′-O-methyl-adenosine (Am), N6,2′-O-dimethyl-adenosine (m⁶Am), N6,N6,2′-O-trimethyl-adenosine (m⁶2Am), 1,2′-O-dimethyl-adenosine (m¹Am), 2′-O-ribosyladenosine (phosphate) (Ar(p)), 2-amino-N6-methyl-purine, 1-thio-adenosine, 8-azido-adenosine, 2′-F-ara-adenosine, 2′-F-adenosine, 2′-OH-ara-adenosine, and N6-(19-amino-pentaoxanonadecyl)-adenosine.

[0366] In some embodiments, the modified nucleobase is a modified guanine. Exemplary nucleobases and nucleosides having a modified guanine include inosine (I), 1-methyl-inosine (m¹I), wyosine (imG), methylwyosine (mimG), 4-demethyl-wyosine (imG-14), isowyosine (imG2), wybutosine (yW), peroxywybutosine (o₂yW), hydroxywybutosine (OHyW), undermodified hydroxywybutosine (OHyW*), 7-deaza-guanosine, queuosine (Q), epoxyqueuosine (oQ), galactosyl-queuosine (galQ), mannosyl-queuosine (manQ), 7-cyano-7-deaza-guanosine (preQ₀), 7-aminomethyl-7-deaza-guanosine (preQ₁), archaeosine (G⁺), 7-deaza-8-aza-guanosine, 6-thio-guanosine, 6-thio-7-deaza-guanosine, 6-thio-7-deaza-8-aza-guanosine, 7-methylguanosine (m7G), 6-thio-7-methyl-guanosine, 7-methyl-inosine, 6-methoxy-guanosine, 1-methylguanosine (m¹G), N2-methyl-guanosine (m²G), N2,N2-dimethyl-guanosine (m²₂G), N2,7-dimethyl-guanosine (m^{2,7}G), N2,N2,7-dimethyl-guanosine (m^{2,2,7}G), 8-oxo-guanosine, 7-methyl-8-oxo-guanosine, 1-methyl-6-thio-guanosine, N2-methyl-6-thio-guanosine, N2,N2-dimethyl-6-thio-guanosine, α-thio-guanosine, 2′-O-methyl-guanosine (Gm), N2-methyl-2′-O-methyl-guanosine (m²Gm), N2,N2-dimethyl-2′-O-methyl-guanosine (m²₂Gm), 1-methyl-2′-O-methyl-guanosine (m¹Gm), N2,7-dimethyl-2′-O-methyl-guanosine (m^{2,7}Gm), 2′-O-methyl-inosine (Im), 1,2′-O-dimethyl-inosine (m¹Im), 2′-O-ribosylguanosine (phosphate) (Gr(p)), 1-thio-guanosine, O6-methyl-guanosine, 2′-F-ara-guanosine, and 2′-F-guanosine.

[0367] Phosphorothioate DNA and RNA have increased nuclease resistance and subsequently a longer half-life in a cellular environment. Phosphorothioate linked nucleic acids are expected to also reduce the innate immune response through weaker binding/activation of cellular innate immune molecules.

[0368] The nucleobase of the nucleotide can be independently selected from a purine, a pyrimidine, a purine or pyrimidine analog. For example, the nucleobase can each be independently selected from adenine, cytosine, guanine, uracil, or hypoxanthine. In another embodiment, the nucleobase can also include, for example, naturally-occurring and synthetic derivatives of a base, including pyrazolo[3,4-d]pyrimidines, 5-methylcytosine (5-me-C), 5-hydroxymethyl cytosine, xanthine, hypoxanthine, 2-aminoadenine, 6-methyl and other alkyl derivatives of adenine and guanine, 2-propyl and other alkyl derivatives of adenine and guanine, 2-thiouracil, 2-thiothymine and 2-thiocytosine, 5-propynyl uracil and cytosine, 6-azo uracil, cytosine and thymine, 5-uracil (pseudouracil), 4-thiouracil, 8-halo (e.g., 8-bromo), 8-amino, 8-thiol, 8-thioalkyl, 8-hydroxyl and other 8-substituted adenines and guanines, 5-halo particularly 5-bromo, 5-trifluoromethyl and other 5-substituted uracils and cytosines, 7-methylguanine and 7-methyladenine, 8-azaguanine and 8-azaadenine, deazaguanine, 7-deazaguanine, 3-deazaguanine, deazaadenine, 7-deazaadenine, 3-deazaadenine, pyrazolo[3,4-d]pyrimidine, imidazo[1,5-a]1,3,5 triazinones, 9-deazapurines, imidazo[4,5-d]pyrazines, thiazolo[4,5-d]pyrimidines, pyrazin-2-ones, 1,2,4-triazine, pyridazine; and 1,3,5 triazine. When the nucleotides are depicted using the shorthand A, G, C, T or U, each letter refers to the representative base and/or derivatives thereof, e.g., A includes adenine or adenine analogs, e.g., 7-deaza adenine).

### Modifications on the Internucleoside Linkage

[0369] The modified nucleotides, which may be incorporated into a nucleic acid or modified RNA molecule, can be modified on the internucleoside linkage (e.g., phosphate backbone). Herein, in the context of the polynucleotides, primary constructs, nucleic acids or modified RNA backbone, the phrases “phosphate” and “phosphodiester” are used interchangeably. Backbone phosphate groups can be modified by replacing one or more of the oxygen atoms with a different substituent. Further, the modified nucleosides and nucleotides can include the wholesale replacement of an unmodified phosphate moiety with another internucleoside linkage as described herein. Examples of modified phosphate groups include, but are not limited to, phosphorothioate, phosphoroselenates, boranophosphates, boranophosphate esters, hydrogen phosphonates, phosphoramidates, phosphorodiamidates, alkyl or aryl phosphonates, and phosphotriesters. Phosphorodithioates have both non-linking oxygens replaced by sulfur. The phosphate linker can also be modified by the replacement of a linking oxygen with nitrogen (bridged phosphoramidates), sulfur (bridged phosphorothioates), and carbon (bridged methylene-phosphonates).

[0370] The α-thio substituted phosphate moiety is provided to confer stability to RNA and DNA polymers through the unnatural phosphorothioate backbone linkages. Phosphorothioate DNA and RNA have increased nuclease resistance and subsequently a longer half-life in a cellular environment. While not wishing to be bound by theory, phosphorothioate linked polynucleotides, primary constructs, nucleic acids or modified RNA molecules are expected to also reduce the innate immune response through weaker binding/activation of cellular innate immune molecules.

[0371] In specific embodiments, a modified nucleoside includes an alpha-thio-nucleoside (e.g., 5′-O-(1-thiophosphate)-adenosine, 5′-O-(1-thiophosphate)-cytidine (α-thio-cytidine), 5′-O-(1-thiophosphate)-guanosine, 5′-O-(1-thiophosphate)-uridine, or 5′-O-(1-thiophosphate)-pseudouridine).

[0372] Other internucleoside linkages that may be employed according to the present invention, including internucleoside linkages which do not contain a phosphorous atom, are described herein below.

### Combinations of Modified Sugars, Nucleobases, and Internucleoside Linkages

[0373] The nucleic acids or modified RNA of the invention can include a combination of modifications to the sugar, the nucleobase, and/or the internucleoside linkage. These combinations can include any one or more modifications described herein. For examples, any of the nucleotides described herein in Formulas (Ia), (Ia-1)-(Ia-3), (Ib)-(If), (IIa)-(IIp), (IIb-1), (IIb-2), (IIc-1)-(IIc-2), (IIn-1), (IIn-2), (IVa)-(IVl), and (IXa)-(IXr) can be combined with any of the nucleobases described herein (e.g., in Formulas (b1)-(b43) or any other described herein).

### Synthesis of Nucleic Acids or Modified RNA Molecules (Modified RNAs)

[0374] Nucleic acids for use in accordance with the invention may be prepared according to any useful technique as described herein or any available technique including, but not limited to chemical synthesis, enzymatic synthesis, which is generally termed in vitro transcription, enzymatic or chemical cleavage of a longer precursor, etc. Methods of synthesizing RNAs are known in the art (see, e.g., Gait, M. J. (ed.) Oligonucleotide synthesis: a practical approach, Oxford [Oxfordshire], Washington, DC: IRL Press, 1984; and Herdewijn, P. (ed.) Oligonucleotide synthesis: methods and applications, Methods in Molecular Biology, v. 288 (Clifton, N.J.) Totowa, N.J.: Humana Press, 2005; both of which are incorporated herein by reference).

[0375] The modified nucleosides and nucleotides used in the synthesis of modified RNAs disclosed herein can be prepared from readily available starting materials using the following general methods and procedures. It is understood that where typical or preferred process conditions (i.e., reaction temperatures, times, mole ratios of reactants, solvents, pressures, etc.) are given; other process conditions can also be used unless otherwise stated. Optimum reaction conditions may vary with the particular reactants or solvent used, but such conditions can be determined by one skilled in the art by routine optimization procedures.

[0376] The processes described herein can be monitored according to any suitable method known in the art. For example, product formation can be monitored by spectroscopic means, such as nuclear magnetic resonance spectroscopy (e.g., ¹H or ¹³C) infrared spectroscopy, spectrophotometry (e.g., UV-visible), or mass spectrometry, or by chromatography such as high performance liquid chromatography (HPLC) or thin layer chromatography.

[0377] Preparation of modified nucleosides and nucleotides used in the manufacture or synthesis of modified RNAs of the present invention can involve the protection and deprotection of various chemical groups. The need for protection and deprotection, and the selection of appropriate protecting groups can be readily determined by one skilled in the art.

[0378] The chemistry of protecting groups can be found, for example, in Greene, et al., Protective Groups in Organic Synthesis, 2d. Ed., Wiley & Sons, 1991, which is incorporated herein by reference in its entirety.

[0379] The reactions of the processes described herein can be carried out in suitable solvents, which can be readily selected by one of skill in the art of organic synthesis. Suitable solvents can be substantially nonreactive with the starting materials (reactants), the intermediates, or products at the temperatures at which the reactions are carried out, i.e., temperatures which can range from the solvent's freezing temperature to the solvent's boiling temperature. A given reaction can be carried out in one solvent or a mixture of more than one solvent. Depending on the particular reaction step, suitable solvents for a particular reaction step can be selected.

[0380] Resolution of racemic mixtures of modified nucleosides and nucleotides can be carried out by any of numerous methods known in the art. An example method includes fractional recrystallization using a “chiral resolving acid” which is an optically active, salt-forming organic acid. Suitable resolving agents for fractional recrystallization methods are, for example, optically active acids, such as the D and L forms of tartaric acid, diacetyltartaric acid, dibenzoyltartaric acid, mandelic acid, malic acid, lactic acid or the various optically active camphorsulfonic acids. Resolution of racemic mixtures can also be carried out by elution on a column packed with an optically active resolving agent (e.g., dinitrobenzoylphenylglycine). Suitable elution solvent composition can be determined by one skilled in the art.

[0381] Modified nucleosides and nucleotides (e.g., building block molecules) can be prepared according to the synthetic methods described in Ogata et al., J. Org. Chem. 74:2585-2588 (2009); Purmal et al., Nucl. Acids Res. 22(1): 72-78, (1994); Fukuhara et al., Biochemistry, 1(4): 563-568 (1962); and Xu et al., Tetrahedron, 48(9): 1729-1740 (1992), each of which are incorporated by reference in their entirety.

[0382] Modified nucleosides and nucleotides (e.g., building block molecules) can be prepared according to the synthetic methods described in Ogata et al., J. Org. Chem. 74:2585-2588 (2009); Purmal et al., Nucl. Acids Res. 22(1): 72-78, (1994); Fukuhara et al., Biochemistry, 1(4): 563-568 (1962); and Xu et al., Tetrahedron, 48(9): 1729-1740 (1992), each of which are incorporated by reference in their entirety.

[0383] The modified nucleic acids of the invention may or may not be uniformly modified along the entire length of the molecule. Different nucleotide modifications and/or backbone structures may exist at various positions in the nucleic acid. One of ordinary skill in the art will appreciate that the nucleotide analogs or other modification(s) may be located at any position(s) of a nucleic acid such that the function of the nucleic acid is not substantially decreased. A modification may also be a 5′ or 3′ terminal modification. The nucleic acids may contain at a minimum one and at maximum 100% modified nucleotides, or any intervening percentage, such as at least 50% modified nucleotides, at least 80% modified nucleotides, or at least 90% modified nucleotides. For example, one or more or all types of nucleotide (e.g., purine or pyrimidine, or any one or more or all of A, G, U, C) may or may not be uniformly modified in a nucleic acids or modified RNA of the invention, or in a given predetermined sequence region thereof. In some embodiments, all nucleotides X in a nucleic acids or modified RNA of the invention (or in a given sequence region thereof) are modified, wherein X may any one of nucleotides A, G, U, C, or any one of the combinations A+G, A+U, A+C, G+U, G+C, U+C, A+G+U, A+G+C, G+U+C or A+G+C.

[0384] Different sugar modifications, nucleotide modifications, and/or internucleoside linkages (e.g., backbone structures) may exist at various positions in the nucleic acids or modified RNA. One of ordinary skill in the art will appreciate that the nucleotide analogs or other modification(s) may be located at any position(s) of a nucleic acid or modified RNA such that the function of the nucleic acids or modified RNA is not substantially decreased. A modification may also be a 5′ or 3′ terminal modification. The nucleic acids or modified RNA may contain from about 1% to about 100% modified nucleotides (either in relation to overall nucleotide content, or in relation to one or more types of nucleotide, i.e. any one or more of A, G, U or C) or any intervening percentage (e.g., from 1% to 20%, from 1% to 25%, from 1% to 50%, from 1% to 60%, from 1% to 70%, from 1% to 80%, from 1% to 90%, from 1% to 95%, from 10% to 20%, from 10% to 25%, from 10% to 50%, from 10% to 60%, from 10% to 70%, from 10% to 80%, from 10% to 90%, from 10% to 95%, from 10% to 100%, from 20% to 25%, from 20% to 50%, from 20% to 60%, from 20% to 70%, from 20% to 80%, from 20% to 90%, from 20% to 95%, from 20% to 100%, from 50% to 60%, from 50% to 70%, from 50% to 80%, from 50% to 90%, from 50% to 95%, from 50% to 100%, from 70% to 80%, from 70% to 90%, from 70% to 95%, from 70% to 100%, from 80% to 90%, from 80% to 95%, from 80% to 100%, from 90% to 95%, from 90% to 100%, and from 95% to 100%).

[0385] In some embodiments, the nucleic acids or modified RNA includes a modified pyrimidine (e.g., a modified uracil/uridine/U or modified cytosine/cytidine/C). In some embodiments, the uracil or uridine (generally: U) in the nucleic acids or modified RNA molecule may be replaced with from about 1% to about 100% of a modified uracil or modified uridine (e.g., from 1% to 20%, from 1% to 25%, from 1% to 50%, from 1% to 60%, from 1% to 70%, from 1% to 80%, from 1% to 90%, from 1% to 95%, from 10% to 20%, from 10% to 25%, from 10% to 50%, from 10% to 60%, from 10% to 70%, from 10% to 80%, from 10% to 90%, from 10% to 95%, from 10% to 100%, from 20% to 25%, from 20% to 50%, from 20% to 60%, from 20% to 70%, from 20% to 80%, from 20% to 90%, from 20% to 95%, from 20% to 100%, from 50% to 60%, from 50% to 70%, from 50% to 80%, from 50% to 90%, from 50% to 95%, from 50% to 100%, from 70% to 80%, from 70% to 90%, from 70% to 95%, from 70% to 100%, from 80% to 90%, from 80% to 95%, from 80% to 100%, from 90% to 95%, from 90% to 100%, and from 95% to 100% of a modified uracil or modified uridine). The modified uracil or uridine can be replaced by a compound having a single unique structure or by a plurality of compounds having different structures (e.g., 2, 3, 4 or more unique structures, as described herein). In some embodiments, the cytosine or cytidine (generally: C) in the nucleic acid or modified RNA molecule may be replaced with from about 1% to about 100% of a modified cytosine or modified cytidine (e.g., from 1% to 20%, from 1% to 25%, from 1% to 50%, from 1% to 60%, from 1% to 70%, from 1% to 80%, from 1% to 90%, from 1% to 95%, from 10% to 20%, from 10% to 25%, from 10% to 50%, from 10% to 60%, from 10% to 70%, from 10% to 80%, from 10% to 90%, from 10% to 95%, from 10% to 100%, from 20% to 25%, from 20% to 50%, from 20% to 60%, from 20% to 70%, from 20% to 80%, from 20% to 90%, from 20% to 95%, from 20% to 100%, from 50% to 60%, from 50% to 70%, from 50% to 80%, from 50% to 90%, from 50% to 95%, from 50% to 100%, from 70% to 80%, from 70% to 90%, from 70% to 95%, from 70% to 100%, from 80% to 90%, from 80% to 95%, from 80% to 100%, from 90% to 95%, from 90% to 100%, and from 95% to 100% of a modified cytosine or modified cytidine). The modified cytosine or cytidine can be replaced by a compound having a single unique structure or by a plurality of compounds having different structures (e.g., 2, 3, 4 or more unique structures, as described herein).

[0386] Other components of the nucleic acid are optional, and are beneficial in some embodiments. For example, a 5′ untranslated region (UTR) and/or a 3′UTR are provided, wherein either or both may independently contain one or more different nucleotide modifications. In such embodiments, nucleotide modifications may also be present in the translatable region. Also provided are nucleic acids containing a Kozak sequence which may include an IRES sequence or not include an IRES sequence (See e.g., the polynucleotides described in Table 30 in Example 31).

[0387] Additionally, provided are nucleic acids containing one or more intronic nucleotide sequences capable of being excised from the nucleic acid.

### Combinations of Nucleotides

[0388] Further examples of modified nucleotides and modified nucleotide combinations are provided below in Table 14. These combinations of modified nucleotides can be used to form the nucleic acids or modified RNA of the invention. Unless otherwise noted, the modified nucleotides may be completely substituted for the natural nucleotides of the nucleic acids or modified RNA of the invention. As a non-limiting example, the natural nucleotide uridine may be substituted with a modified nucleoside described herein. In another non-limiting example, the natural nucleotide uridine may be partially substituted (e.g., about 0.1%, 1%, 5%, 10%, 15%, 20%, 25%, 30%, 35%, 40%, 45%, 50%, 55%, 60%, 65%, 70%, 75%, 80%, 85%, 90%, 95% or 99.9%) with at least one of the modified nucleoside disclosed herein.

TABLE 14
Chemical Modifications

| Modified Nucleotide | Modified Nucleotide Combination |
|---|---|
| 6-aza-cytidine | α-thio-cytidine/5-iodo-uridine |
| 2-thio-cytidine | α-thio-cytidine/N1-methyl-pseudo-uridine |
| α-thio-cytidine | α-thio-cytidine/α-thio-uridine |
| Pseudo-iso-cytidine | α-thio-cytidine/5-methyl-uridine |
| 5-aminoallyl-uridine | α-thio-cytidine/pseudo-uridine |
| 5-iodo-uridine | Pseudo-iso-cytidine/5-iodo-uridine |
| N1-methyl-pseudouridine | Pseudo-iso-cytidine/N1-methyl-pseudo-uridine |
| 5,6-dihydrouridine | Pseudo-iso-cytidine/α-thio-uridine |
| α-thio-uridine | Pseudo-iso-cytidine/5-methyl-uridine |
| 4-thio-uridine | Pseudo-iso-cytidine/Pseudo-uridine |
| 6-aza-uridine | |
| 5-hydroxy-uridine | Pyrrolo-cytidine/5-iodo-uridine |
| Deoxy-thymidine | Pyrrolo-cytidine/N1-methyl-pseudo-uridine |
| Pseudo-uridine | Pyrrolo-cytidine/α-thio-uridine |
| Inosine | Pyrrolo-cytidine/5-methyl-uridine |
| α-thio-guanosine | Pyrrolo-cytidine/Pseudo-uridine |
| 8-oxo-guanosine | 5-methyl-cytidine/5-iodo-uridine |
| O6-methyl-guanosine | 5-methyl-cytidine/N1-methyl-pseudo-uridine |
| 7-deaza-guanosine | 5-methyl-cytidine/α-thio-uridine |
| No modification | 5-methyl-cytidine/5-methyl-uridine |
| N1-methyl-adenosine | 5-methyl-cytidine/Pseudo-uridine |
| 2-amino-6-Chloro-purine | |
| N6-methyl-2-amino-purine | about 25% of cytosines are Pseudo-iso-cytidine |
| 6-Chloro-purine | about 25% of uridines are N1-methyl-pseudo-uridine |
| N6-methyl-adenosine | 25% N1-Methyl-pseudo-uridine/75%-pseudo-uridine |
| α-thio-adenosine | |
| 8-azido-adenosine | |
| 7-deaza-adenosine | about 50% of the cytosines are pyrrolo-cytidine |
| Pyrrolo-cytidine | 5-methyl-cytidine/5-iodo-uridine |
| 5-methyl-cytidine | 5-methyl-cytidine/N1-methyl-pseudouridine |
| N4-acetyl-cytidine | 5-methyl-cytidine/α-thio-uridine |
| 5-methyl-uridine | 5-methyl-cytidine/5-methyl-uridine |
| 5-iodo-cytidine | 5-methyl-cytidine/pseudouridine |
| | about 25% of cytosines are 5-methyl-cytidine |
| | about 50% of cytosines are 5-methyl-cytidine |
| | 5-methyl-cytidine/5-methoxy-uridine |
| | 5-methyl-cytidine/5-bromo-uridine |
| | 5-methyl-cytidine/2-thio-uridine |
| | 5-methyl-cytidine/about 50% of uridines are 2-thio-uridine |
| | about 50% of uridines are 5-methyl-cytidine/about 50% |
| | of uridines are 2-thio-uridine |
| | N4-acetyl-cytidine/5-iodo-uridine |
| | N4-acetyl-cytidine/N1-methyl-pseudouridine |
| | N4-acetyl-cytidine/α-thio-uridine |
| | N4-acetyl-cytidine/5-methyl-uridine |
| | N4-acetyl-cytidine/pseudouridine |
| | about 50% of cytosines are N4-acetyl-cytidine |
| | about 25% of cytosines are N4-acetyl-cytidine |
| | N4-acetyl-cytidine/5-methoxy-uridine |
| | N4-acetyl-cytidine/5-bromo-uridine |
| | N4-acetyl-cytidine/2-thio-uridine |
| | about 50% of cytosines are N4-acetyl-cytidine/about 50% |
| | of uridines are 2-thio-uridine |
| | pseudoisocytidine/about 50% of uridines are N1-methyl- |
| | pseudouridine and about 50% of uridines are pseudouridine |
| | pseudoisocytidine/about 25% of uridines are N1-methyl- |
| | pseudouridine and about 25% of uridines are pseudouridine |
| | (e.g., 25% N1-methyl-pseudouridine/75% pseudouridine) |
| | about 50% of the cytosines are α-thio-cytidine |

[0389] Certain modified nucleotides and nucleotide combinations have been explored by the current inventors. These findings are described in U.S. Provisional Application No. 61/404,413, filed on Oct. 1, 2010, entitled Engineered Nucleic Acids and Methods of Use Thereof, U.S. patent application Ser. No. 13/251,840, filed on Oct. 3, 2011, entitled Modified Nucleotides, and Nucleic Acids, and Uses Thereof, now abandoned, U.S. patent application Ser. No. 13/481,127, filed on May 25, 2012, entitled Modified Nucleotides, and Nucleic Acids, and Uses Thereof, International Patent Publication No WO2012045075, filed on Oct. 3, 2011, entitled Modified Nucleosides, Nucleotides, And Nucleic Acids, and Uses Thereof, U.S. Patent Publication No US20120237975 filed on Oct. 3, 2011, entitled Engineered Nucleic Acids and Method of Use Thereof, and International Patent Publication No WO2012045082, which are incorporated by reference in their entireties.

[0390] Further examples of modified nucleotide combinations are provided below in Table 15. These combinations of modified nucleotides can be used to form the nucleic acids of the invention.

TABLE 15
Chemical Modifications

| Modified Nucleotide | Modified Nucleotide Combination |
|---|---|
| modified cytidine having | modified cytidine with (b10)/pseudouridine |
| one or more nucleobases | modified cytidine with (b10)/N1-methyl- |
| of Formula (b10) | pseudouridine |
| | modified cytidine with (b10)/5-methoxy- |
| | uridine |
| | modified cytidine with (b10)/5-methyl-uridine |
| | modified cytidine with (b10)/5-bromo-uridine |
| | modified cytidine with (b10)/2-thio-uridine |
| | about 50% of cytidine substituted with |
| | modified cytidine (b10)/ about 50% of |
| | uridines are 2-thio-uridine |
| modified cytidine | modified cytidine with (b32)/pseudouridine |
| having one or more | modified cytidine with (b32)/N1-methyl- |
| nucleobases of | pseudouridine |
| Formula (b32) | modified cytidine with (b32)/5-methoxy- |
| | uridine |
| | modified cytidine with (b32)/5-methyl-uridine |
| | modified cytidine with (b32)/5-bromo-uridine |
| | modified cytidine with (b32)/2-thio-uridine |
| | about 50% of cytidine substituted with |
| | modified cytidine (b32)/ about 50% of |
| | uridines are 2-thio-uridine |
| modified uridine having | modified uridine with (b1)/N4-acetyl- |
| one or more nucleobases | cytidine |
| of Formula (b1) | modified uridine with (b1)/5-methyl-cytidine |
| modified uridine having | modified uridine with (b8)/N4-acetyl- |
| one or more nucleobases | cytidine |
| of Formula (b8) | modified uridine with (b8)/5-methyl-cytidine |
| modified uridine having | modified uridine with (b28)/N4-acetyl- |
| one or more nucleobases | cytidine |
| of Formula (b28) | modified uridine with (b28)/5-methyl- |
| | cytidine |
| modified uridine having | modified uridine with (b29)/N4-acetyl- |
| one or more nucleobases | cytidine |
| of Formula (b29) | modified uridine with (b29)/5-methyl- |
| | cytidine |
| modified uridine having | modified uridine with (b30)/N4-acetyl- |
| one or more nucleobases | cytidine |
| of Formula (b30) | modified uridine with (b30)/5-methyl- |
| | cytidine |

[0391] In some embodiments, at least 25% of the cytosines are replaced by a compound of Formula (b10)-(b14), (b24), (b25), or (b32)-(b35) (e.g., at least about 30%, at least about 35%, at least about 40%, at least about 45%, at least about 50%, at least about 55%, at least about 60%, at least about 65%, at least about 70%, at least about 75%, at least about 80%, at least about 85%, at least about 90%, at least about 95%, or about 100% of, e.g., a compound of Formula (b10) or (b32)).

[0392] In some embodiments, at least 25% of the uracils are replaced by a compound of Formula (b1)-(b9), (b21)-(b23), or (b28)-(b31) (e.g., at least about 30%, at least about 35%, at least about 40%, at least about 45%, at least about 50%, at least about 55%, at least about 60%, at least about 65%, at least about 70%, at least about 75%, at least about 80%, at least about 85%, at least about 90%, at least about 95%, or about 100% of, e.g., a compound of Formula (b1), (b8), (b28), (b29), or (b30)).

[0393] In some embodiments, at least 25% of the cytosines are replaced by a compound of Formula (b10)-(b14), (b24), (b25), or (b32)-(b35) (e.g. Formula (b10) or (b32)), and at least 25% of the uracils are replaced by a compound of Formula (b1)-(b9), (b21)-(b23), or (b28)-(b31) (e.g. Formula (b1), (b8), (b28), (b29), or (b30)) (e.g., at least about 30%, at least about 35%, at least about 40%, at least about 45%, at least about 50%, at least about 55%, at least about 60%, at least about 65%, at least about 70%, at least about 75%, at least about 80%, at least about 85%, at least about 90%, at least about 95%, or about 100%).

### Modifications Including Linker and a Payload

### Payload

[0394] The methods and compositions described herein are useful for delivering a payload to a biological target. The payload can be used, e.g., for labeling (e.g., a detectable agent such as a fluorophore), or for therapeutic purposes (e.g., a cytotoxin or other therapeutic agent).

### Payload: Therapeutic Agents

[0395] In some embodiments the payload is a therapeutic agent such as a cytotoxin, radioactive ion, chemotherapeutic, or other therapeutic agent. A cytotoxin or cytotoxic agent includes any agent that is detrimental to cells. Examples include taxol, cytochalasin B, gramicidin D, ethidium bromide, emetine, mitomycin, etoposide, tenoposide, vincristine, vinblastine, colchicin, doxorubicin, daunorubicin, dihydroxy anthracin dione, mitoxantrone, mithramycin, actinomycin D, 1-dehydrotestosterone, glucocorticoids, procaine, tetracaine, lidocaine, propranolol, puromycin, maytansinoids, e.g., maytansinol (see U.S. Pat. No. 5,208,020), CC-1065 (see U.S. Pat. Nos. 5,475,092, 5,585,499, 5,846,545) and analogs or homologs thereof. Radioactive ions include, but are not limited to iodine (e.g., iodine 125 or iodine 131), strontium 89, phosphorous, palladium, cesium, iridium, phosphate, cobalt, yttrium 90, Samarium 153 and praseodymium. Other therapeutic agents include, but are not limited to, antimetabolites (e.g., methotrexate, 6-mercaptopurine, 6-thioguanine, cytarabine, 5-fluorouracil decarbazine), alkylating agents (e.g., mechlorethamine, thioepa chlorambucil, CC-1065, melphalan, carmustine (BSNU) and lomustine (CCNU), cyclothosphamide, busulfan, dibromomannitol, streptozotocin, mitomycin C, and cis-dichlorodiamine platinum (II) (DDP) cisplatin), anthracyclines (e.g., daunorubicin (formerly daunomycin) and doxorubicin), antibiotics (e.g., dactinomycin (formerly actinomycin), bleomycin, mithramycin, and anthramycin (AMC)), and anti-mitotic agents (e.g., vincristine, vinblastine, taxol and maytansinoids).

### Payload: Detectable Agents

[0396] Examples of detectable substances include various organic small molecules, inorganic compounds, nanoparticles, enzymes or enzyme substrates, fluorescent materials, luminescent materials, bioluminescent materials, chemiluminescent materials, radioactive materials, and contrast agents. Such optically-detectable labels include for example, without limitation, 4-acetamido-4′-isothiocyanatostilbene-2,2′disulfonic acid; acridine and derivatives: acridine, acridine isothiocyanate; 5-(2′-aminoethyl)aminonaphthalene-1-sulfonic acid (EDANS); 4-amino-N-[3-vinylsulfonyl)phenyl]naphthalimide-3,5 disulfonate; N-(4-anilino-1-naphthyl)maleimide; anthranilamide; BODIPY; Brilliant Yellow; coumarin and derivatives; coumarin, 7-amino-4-methylcoumarin (AMC, Coumarin 120), 7-amino-4-trifluoromethylcouluarin (Coumaran 151); cyanine dyes; cyanosine; 4′,6-diaminidino-2-phenylindole (DAPI); 5′ 5″-dibromopyrogallol-sulfonaphthalein (Bromopyrogallol Red); 7-diethylamino-3-(4′-isothiocyanatophenyl)-4-methylcoumarin; diethylenetriamine pentaacetate; 4,4′-diisothiocyanatodihydro-stilbene-2,2′-disulfonic acid; 4,4′-diisothiocyanatostilbene-2,2′-disulfonic acid; 5-[dimethylamino]-naphthalene-1-sulfonyl chloride (DNS, dansylchloride); 4-dimethylaminophenylazophenyl-4′-isothiocyanate (DABITC); eosin and derivatives; eosin, eosin isothiocyanate, erythrosin and derivatives; erythrosin B, erythrosin, isothiocyanate; ethidium; fluorescein and derivatives; 5-carboxyfluorescein (FAM), 5-(4,6-dichlorotriazin-2-yl)aminofluorescein (DTAF), 2′,7′-dimethoxy-4′5′-dichloro-6-carboxyfluorescein, fluorescein, fluorescein isothiocyanate, QFITC, (XRITC); fluorescamine; IR144; IR1446; Malachite Green isothiocyanate; 4-methylumbelliferoneortho cresolphthalein; nitrotyrosine; pararosaniline; Phenol Red; B-phycoerythrin; o-phthaldialdehyde; pyrene and derivatives: pyrene, pyrene butyrate, succinimidyl 1-pyrene; butyrate quantum dots; Reactive Red 4 (Cibacron™ Brilliant Red 3B-A) rhodamine and derivatives: 6-carboxy-X-rhodamine (ROX), 6-carboxyrhodamine (R6G), lissamine rhodamine B sulfonyl chloride rhodarnine (Rhod), rhodamine B, rhodamine 123, rhodamine X isothiocyanate, sulforhodamine B, sulforhodamine 101, sulfonyl chloride derivative of sulforhodamine 101 (Texas Red); N,N,N′,N′tetramethyl-6-carboxyrhodamine (TAMRA); tetramethyl rhodamine; tetramethyl rhodamine isothiocyanate (TRITC); riboflavin; rosolic acid; terbium chelate derivatives; Cyanine-3 (Cy3); Cyanine-5 (Cy5); Cyanine-5.5 (Cy5.5), Cyanine-7 (Cy7); IRD 700; IRD 800; Alexa 647; La Jolta Blue; phthalo cyanine; and naphthalo cyanine. In some embodiments, the detectable label is a fluorescent dye, such as Cy5 and Cy3.

[0397] Examples luminescent material includes luminol; examples of bioluminescent materials include luciferase, luciferin, and aequorin.

[0398] Examples of suitable radioactive material include ¹⁸F, ⁶⁷Ga, ^{81m}Kr, ⁸²Rb, ¹¹¹In, ¹²³I, ¹³³Xe, ²⁰¹Tl, ¹²⁵I, ³⁵S, ¹⁴C, or ³H, ^{99m}Tc (e.g., as pertechnetate (technetate(VII), TcO₄⁻) either directly or indirectly, or other radioisotope detectable by direct counting of radioemission or by scintillation counting.

[0399] In addition, contrast agents, e.g., contrast agents for MRI or NMR, for X-ray CT, Raman imaging, optical coherence tomography, absorption imaging, ultrasound imaging, or thermal imaging can be used. Exemplary contrast agents include gold (e.g., gold nanoparticles), gadolinium (e.g., chelated Gd), iron oxides (e.g., superparamagnetic iron oxide (SPIO), monocrystalline iron oxide nanoparticles (MIONs), and ultrasmall superparamagnetic iron oxide (USPIO)), manganese chelates (e.g., Mn-DPDP), barium sulfate, iodinated contrast media (iohexol), microbubbles, or perfluorocarbons can also be used.

[0400] In some embodiments, the detectable agent is a non-detectable pre-cursor that becomes detectable upon activation. Examples include fluorogenic tetrazine-fluorophore constructs (e.g., tetrazine-BODIPY FL, tetrazine-Oregon Green 488, or tetrazine-BODIPY TMR-X) or enzyme activatable fluorogenic agents (e.g., PROSENSE (VisEn Medical)).

[0401] When the compounds are enzymatically labeled with, for example, horseradish peroxidase, alkaline phosphatase, or luciferase, the enzymatic label is detected by determination of conversion of an appropriate substrate to product.

[0402] In vitro assays in which these compositions can be used include enzyme linked immunosorbent assays (ELISAs), immunoprecipitations, immunofluorescence, enzyme immunoassay (EIA), radioimmunoassay (RIA), and Western blot analysis.

[0403] Labels other than those described herein are contemplated by the present disclosure, including other optically-detectable labels. Labels can be attached to the modified nucleotide of the present disclosure at any position using standard chemistries such that the label can be removed from the incorporated base upon cleavage of the cleavable linker.

### Payload: Cell Penetrating Payloads

[0404] In some embodiments, the modified nucleotides and modified nucleic acids can also include a payload that can be a cell penetrating moiety or agent that enhances intracellular delivery of the compositions. For example, the compositions can include a cell-penetrating peptide sequence that facilitates delivery to the intracellular space, e.g., HIV-derived TAT peptide, penetratins, transportans, or hCT derived cell-penetrating peptides, see, e.g., Caron et al., (2001) Mol Ther. 3(3):310-8; Langel, Cell-Penetrating Peptides: Processes and Applications (CRC Press, Boca Raton FL 2002); El-Andaloussi et al., (2005) Curr Pharm Des. 11(28):3597-611; and Deshayes et al., (2005) Cell Mol Life Sci. 62(16):1839-49. The compositions can also be formulated to include a cell penetrating agent, e.g., liposomes, which enhance delivery of the compositions to the intracellular space.

### Payload: Biological Targets

[0405] The modified nucleotides and modified nucleic acids described herein can be used to deliver a payload to any biological target for which a specific ligand exists or can be generated. The ligand can bind to the biological target either covalently or non-covalently.

[0406] Exemplary biological targets include biopolymers, e.g., antibodies, nucleic acids such as RNA and DNA, proteins, enzymes; exemplary proteins include enzymes, receptors, and ion channels. In some embodiments the target is a tissue- or cell-type specific marker, e.g., a protein that is expressed specifically on a selected tissue or cell type. In some embodiments, the target is a receptor, such as, but not limited to, plasma membrane receptors and nuclear receptors; more specific examples include G-protein-coupled receptors, cell pore proteins, transporter proteins, surface-expressed antibodies, HLA proteins, MHC proteins and growth factor receptors.

### Synthesis of Modified Nucleotides

[0407] The modified nucleosides and nucleotides disclosed herein can be prepared from readily available starting materials using the following general methods and procedures. It is understood that where typical or preferred process conditions (i.e., reaction temperatures, times, mole ratios of reactants, solvents, pressures, etc.) are given; other process conditions can also be used unless otherwise stated. Optimum reaction conditions may vary with the particular reactants or solvent used, but such conditions can be determined by one skilled in the art by routine optimization procedures.

[0408] The processes described herein can be monitored according to any suitable method known in the art. For example, product formation can be monitored by spectroscopic means, such as nuclear magnetic resonance spectroscopy (e.g., ¹H or ¹³C) infrared spectroscopy, spectrophotometry (e.g., UV-visible), or mass spectrometry, or by chromatography such as high performance liquid chromatography (HPLC) or thin layer chromatography.

[0409] Preparation of modified nucleosides and nucleotides can involve the protection and deprotection of various chemical groups. The need for protection and deprotection, and the selection of appropriate protecting groups can be readily determined by one skilled in the art. The chemistry of protecting groups can be found, for example, in Greene, et al., Protective Groups in Organic Synthesis, 2d. Ed., Wiley & Sons, 1991, which is incorporated herein by reference in its entirety.

[0410] The reactions of the processes described herein can be carried out in suitable solvents, which can be readily selected by one of skill in the art of organic synthesis. Suitable solvents can be substantially nonreactive with the starting materials (reactants), the intermediates, or products at the temperatures at which the reactions are carried out, i.e., temperatures which can range from the solvent's freezing temperature to the solvent's boiling temperature. A given reaction can be carried out in one solvent or a mixture of more than one solvent. Depending on the particular reaction step, suitable solvents for a particular reaction step can be selected.

[0411] Resolution of racemic mixtures of modified nucleosides and nucleotides can be carried out by any of numerous methods known in the art. An example method includes fractional recrystallization using a “chiral resolving acid” which is an optically active, salt-forming organic acid. Suitable resolving agents for fractional recrystallization methods are, for example, optically active acids, such as the D and L forms of tartaric acid, diacetyltartaric acid, dibenzoyltartaric acid, mandelic acid, malic acid, lactic acid or the various optically active camphorsulfonic acids. Resolution of racemic mixtures can also be carried out by elution on a column packed with an optically active resolving agent (e.g., dinitrobenzoylphenylglycine). Suitable elution solvent composition can be determined by one skilled in the art.

### Length

[0412] Generally, the length of a modified mRNA of the present invention is greater than 30 nucleotides in length. In another embodiment, the RNA molecule is greater than 35 nucleotides in length. In another embodiment, the length is at least 40 nucleotides. In another embodiment, the length is at least 45 nucleotides. In another embodiment, the length is at least 55 nucleotides. In another embodiment, the length is at least 60 nucleotides. In another embodiment, the length is at least 60 nucleotides. In another embodiment, the length is at least 80 nucleotides. In another embodiment, the length is at least 90 nucleotides. In another embodiment, the length is at least 100 nucleotides. In another embodiment, the length is at least 120 nucleotides. In another embodiment, the length is at least 140 nucleotides. In another embodiment, the length is at least 160 nucleotides. In another embodiment, the length is at least 180 nucleotides. In another embodiment, the length is at least 200 nucleotides. In another embodiment, the length is at least 250 nucleotides. In another embodiment, the length is at least 300 nucleotides. In another embodiment, the length is at least 350 nucleotides. In another embodiment, the length is at least 400 nucleotides. In another embodiment, the length is at least 450 nucleotides. In another embodiment, the length is at least 500 nucleotides. In another embodiment, the length is at least 600 nucleotides. In another embodiment, the length is at least 700 nucleotides. In another embodiment, the length is at least 800 nucleotides. In another embodiment, the length is at least 900 nucleotides. In another embodiment, the length is at least 1000 nucleotides. In another embodiment, the length is at least 1100 nucleotides. In another embodiment, the length is at least 1200 nucleotides. In another embodiment, the length is at least 1300 nucleotides. In another embodiment, the length is at least 1400 nucleotides. In another embodiment, the length is at least 1500 nucleotides. In another embodiment, the length is at least 1600 nucleotides. In another embodiment, the length is at least 1800 nucleotides. In another embodiment, the length is at least 2000 nucleotides. In another embodiment, the length is at least 2500 nucleotides. In another embodiment, the length is at least 3000 nucleotides. In another embodiment, the length is at least 4000 nucleotides. In another embodiment, the length is at least 5000 nucleotides, or greater than 5000 nucleotides. In another embodiment, the length is at least 5000 nucleotides, or greater than 6000 nucleotides. In another embodiment, the length is at least 7000 nucleotides, or greater than 7000 nucleotides. In another embodiment, the length is at least 8000 nucleotides, or greater than 8000 nucleotides. In another embodiment, the length is at least 9000 nucleotides, or greater than 9000 nucleotides. In another embodiment, the length is at least 10,000 nucleotides, or greater than 10,000 nucleotides.

### Use of Modified RNAs

### Prevention or Reduction of Innate Cellular Immune Response Activation

[0413] The term “innate immune response” includes a cellular response to exogenous single stranded nucleic acids, generally of viral or bacterial origin, which involves the induction of cytokine expression and release, particularly the interferons, and cell death. Protein synthesis is also reduced during the innate cellular immune response. While it is advantageous to eliminate the innate immune response in a cell, the invention provides modified mRNAs that substantially reduce the immune response, including interferon signaling, without entirely eliminating such a response. In some embodiments, the immune response is reduced by 10%, 20%, 30%, 40%, 50%, 60%, 70%, 80%, 90%, 95%, 99%, 99.9%, or greater than 99.9% as compared to the immune response induced by a corresponding unmodified nucleic acid. Such a reduction can be measured by expression or activity level of Type 1 interferons or the expression of interferon-regulated genes such as the toll-like receptors (e.g., TLR7 and TLR8). Reduction of innate immune response can also be measured by decreased cell death following one or more administrations of modified RNAs to a cell population; e.g., cell death is 10%, 25%, 50%, 75%, 85%, 90%, 95%, or over 95% less than the cell death frequency observed with a corresponding unmodified nucleic acid. Moreover, cell death may affect fewer than 50%, 40%, 30%, 20%, 10%, 5%, 1%, 0.1%, 0.01% or fewer than 0.01% of cells contacted with the modified nucleic acids.

[0414] The invention provides for the repeated introduction (e.g., transfection) of modified nucleic acids into a target cell population, e.g., in vitro, ex vivo, or in vivo. The step of contacting the cell population may be repeated one or more times (such as two, three, four, five or more than five times). In some embodiments, the step of contacting the cell population with the modified nucleic acids is repeated a number of times sufficient such that a predetermined efficiency of protein translation in the cell population is achieved. Given the reduced cytotoxicity of the target cell population provided by the nucleic acid modifications, such repeated transfections are achievable in a diverse array of cell types.

### Major Groove Interacting Partners

[0415] As described herein, the phrase “major groove interacting partner” refers to RNA recognition receptors that detect and respond to RNA ligands through interactions, e.g. binding, with the major groove face of a nucleotide or nucleic acid. As such, RNA ligands comprising modified nucleotides or nucleic acids such as the modified RNAs as described herein decrease interactions with major groove binding partners, and therefore decrease an innate immune response.

[0416] Example major groove interacting, e.g. binding, partners include, but are not limited to the following nucleases and helicases. Within membranes, TLRs (Toll-like Receptors) 3, 7, and 8 can respond to single- and double-stranded RNAs. Within the cytoplasm, members of the superfamily 2 class of DEX(D/H) helicases and ATPases can sense RNAs to initiate antiviral responses. These helicases include the RIG-I (retinoic acid-inducible gene I) and MDA5 (melanoma differentiation-associated gene 5). Other examples include laboratory of genetics and physiology 2 (LGP2), HIN-200 domain containing proteins, or Helicase-domain containing proteins.

### RNA Binding Proteins

[0417] In some embodiments of the present invention, RNA binding proteins are provided. RNA binding proteins may be provided as proteins and/or as nucleic acids encoding such proteins. RNA binding proteins play a multitude of roles in regulating RNA stability and protein translation. A/U rich elements in the 3′ UTR of mRNAs leads to formation of secondary structures which are bound by A/U Rich Binding Protiens (AREBPs) resulting in increased or decreased mRNA stability (Fan, X. C. et al., Overexpression of HuR, a nuclear-cytoplasmic shuttling protein, increases the in vivo stability of ARE-containing mRNAs. EMBO J. 1998 Jun. 15; 17(12):3448-60). HuR is a stabilizing AREBP. To increase the stability of the mRNA of interest, an mRNA encoding HuR can be co-transfected or co-injected along with the mRNA of interest into the cells or into the tissue. These proteins can also be tethered to the mRNA of interest in vitro and then administered to the cells together. Poly A tail binding protein, PABP interacts with eukaryotic translation initiation factor eIF4G to stimulate translational initiation. Co-administration of mRNAs encoding these RBPs along with the mRNA drug and/or tethering these proteins to the mRNA drug in vitro and administering the protein-bound mRNA into the cells can increase the translational efficiency of the mRNA. The same concept can be extended to co-administration of mRNA along with mRNAs encoding various translation factors and facilitators as well as with the proteins themselves to influence RNA stability and/or translational efficiency.

### Polypeptide Variants

[0418] Provided are nucleic acids that encode variant polypeptides, which have a certain identity with a reference polypeptide sequence. The term “identity” as known in the art, refers to a relationship between the sequences of two or more peptides, as determined by comparing the sequences. In the art, “identity” also means the degree of sequence relatedness between peptides, as determined by the number of matches between strings of two or more amino acid residues.

[0419] “Identity” measures the percent of identical matches between the smaller of two or more sequences with gap alignments (if any) addressed by a particular mathematical model or computer program (i.e., “algorithms”). Identity of related peptides can be readily calculated by known methods. Such methods include, but are not limited to, those described in Computational Molecular Biology, Lesk, A. M., ed., Oxford University Press, New York, 1988; Biocomputing: Informatics and Genome Projects, Smith, D. W., ed., Academic Press, New York, 1993; Computer Analysis of Sequence Data, Part 1, Griffin, A. M., and Griffin, H. G., eds., Humana Press, New Jersey, 1994; Sequence Analysis in Molecular Biology, von Heinje, G., Academic Press, 1987; Sequence Analysis Primer, Gribskov, M. and Devereux, J., eds., M. Stockton Press, New York, 1991; and Carillo et al., SIAM J. Applied Math. 48, 1073 (1988).

[0420] In some embodiments, the polypeptide variant has the same or a similar activity as the reference polypeptide. Alternatively, the variant has an altered activity (e.g., increased or decreased) relative to a reference polypeptide. Generally, variants of a particular polynucleotide or polypeptide of the invention will have at least about 40%, 45%, 50%, 55%, 60%, 65%, 70%, 75%, 80%, 85%, 90%, 91%, 92%, 93%, 94%, 95%, 96%, 97%, 98%, 99% or more sequence identity to that particular reference polynucleotide or polypeptide as determined by sequence alignment programs and parameters described herein and known to those skilled in the art.

[0421] As recognized by those skilled in the art, protein fragments, functional protein domains, and homologous proteins are also considered to be within the scope of this invention. For example, provided herein is any protein fragment of a reference protein (meaning a polypeptide sequence at least one amino acid residue shorter than a reference polypeptide sequence but otherwise identical) 10, 20, 30, 40, 50, 60, 70, 80, 90, 100 or greater than 100 amino acids in length In another example, any protein that includes a stretch of about 20, about 30, about 40, about 50, or about 100 amino acids which are about 40%, about 50%, about 60%, about 70%, about 80%, about 90%, about 95%, or about 100% identical to any of the sequences described herein can be utilized in accordance with the invention. In certain embodiments, a protein sequence to be utilized in accordance with the invention includes 2, 3, 4, 5, 6, 7, 8, 9, 10, or more mutations as shown in any of the sequences provided or referenced herein.

### Polypeptide Libraries

[0422] Also provided are polynucleotide libraries containing nucleoside modifications, wherein the polynucleotides individually contain a first nucleic acid sequence encoding a polypeptide, such as an antibody, protein binding partner, scaffold protein, and other polypeptides known in the art. Preferably, the polynucleotides are mRNA in a form suitable for direct introduction into a target cell host, which in turn synthesizes the encoded polypeptide.

[0423] In certain embodiments, multiple variants of a protein, each with different amino acid modification(s), are produced and tested to determine the best variant in terms of pharmacokinetics, stability, biocompatibility, and/or biological activity, or a biophysical property such as expression level. Such a library may contain 10, 10², 10³, 10⁴, 10¹, 10⁶, 10⁷, 10⁸, 10⁹, or over 10⁹ possible variants (including substitutions, deletions of one or more residues, and insertion of one or more residues).

### Polypeptide-Nucleic Acid Complexes

[0424] Proper protein translation involves the physical aggregation of a number of polypeptides and nucleic acids associated with the mRNA. Provided by the invention are complexes containing conjugates of protein and nucleic acids, containing a translatable mRNA having one or more nucleoside modifications (e.g., at least two different nucleoside modifications) and one or more polypeptides bound to the mRNA. Generally, the proteins are provided in an amount effective to prevent or reduce an innate immune response of a cell into which the complex is introduced.

### Targeting Moieties

[0425] In embodiments of the invention, modified nucleic acids are provided to express a protein-binding partner or a receptor on the surface of the cell, which functions to target the cell to a specific tissue space or to interact with a specific moiety, either in vivo or in vitro. Suitable protein-binding partners include antibodies and functional fragments thereof, scaffold proteins, or peptides. Additionally, modified nucleic acids can be employed to direct the synthesis and extracellular localization of lipids, carbohydrates, or other biological moieties.

[0426] As described herein, a useful feature of the modified nucleic acids of the invention is the capacity to reduce the innate immune response of a cell to an exogenous nucleic acid. Provided are methods for performing the titration, reduction or elimination of the immune response in a cell or a population of cells. In some embodiments, the cell is contacted with a first composition that contains a first dose of a first exogenous nucleic acid including a translatable region and at least one nucleoside modification, and the level of the innate immune response of the cell to the first exogenous nucleic acid is determined. Subsequently, the cell is contacted with a second composition, which includes a second dose of the first exogenous nucleic acid, the second dose containing a lesser amount of the first exogenous nucleic acid as compared to the first dose.

[0427] Alternatively, the cell is contacted with a first dose of a second exogenous nucleic acid. The second exogenous nucleic acid may contain one or more modified nucleosides, which may be the same or different from the first exogenous nucleic acid or, alternatively, the second exogenous nucleic acid may not contain modified nucleosides. The steps of contacting the cell with the first composition and/or the second composition may be repeated one or more times.

[0428] Additionally, efficiency of protein production (e.g., protein translation) in the cell is optionally determined, and the cell may be re-transfected with the first and/or second composition repeatedly until a target protein production efficiency is achieved.

[0429] In one embodiment, the 3′ end of the modified nucleic acids described herein may include a sequence for targeting the modified nucleic acid to a desired location within the cell such as, but not limited to, microvesicles within a cell. The sequence for targeting may be “zip code-like” in its function as it can be recognized by the cellular machinery that can traffic molecules to various places within the cell. Non-limiting examples of sequences for targeting nucleic acids are described in International Patent Publication No. WO2013109713, the contents of which are herein incorporated by reference in its entirety. Zip-code like sequences and miR-1289 have been shown by Bolukbasi et al. to enrich mRNA in microvesicles (Mol. Ther. Nuc. Acid 2012 1, e10; the contents of which are herein incorporated by reference in its entirety) as both zipcodes and microRNA have a role in post-transcriptional regulation of mRNA.

[0430] In one embodiment, the sequence for targeting the modified nucleic acid is SEQ ID NO: 22, SEQ ID NO: 38 or a concatomer of at least one SEQ ID NO: 22 and at least one SEQ ID NO: 38 as described in International Patent Publication No. WO2013109713, the contents of which are herein incorporated by reference in its entirety.

### Vaccines

[0431] As described herein, provided are mRNAs having sequences that are substantially not translatable. Such mRNA is effective as a vaccine when administered to a mammalian subject.

[0432] Also provided are modified nucleic acids that contain one or more noncoding regions. Such modified nucleic acids are generally not translated, but are capable of binding to and sequestering one or more translational machinery component such as a ribosomal protein or a transfer RNA (tRNA), thereby effectively reducing protein expression in the cell. The modified nucleic acid may contain a small nucleolar RNA (sno-RNA), micro RNA (miRNA), small interfering RNA (siRNA) or Piwi-interacting RNA (piRNA).

[0433] Additionally, certain modified nucleosides, or combinations thereof, when introduced into modified nucleic acids activate the innate immune response. Such activating modified nucleic acids, e.g., modified RNAs, are useful as adjuvants when combined with polypeptide or other vaccines. In certain embodiments, the activated modified mRNAs contain a translatable region which encodes for a polypeptide sequence useful as a vaccine, thus providing the ability to be a self-adjuvant.

### Therapeutic Agents

[0434] The modified nucleic acids (modified RNAs) and the proteins translated from the modified nucleic acids described herein can be used as therapeutic agents. For example, a modified nucleic acid described herein can be administered to a subject, wherein the modified nucleic acid is translated in vivo to produce a therapeutic peptide in the subject. Provided are compositions, methods, kits, and reagents for treatment or prevention of disease or conditions in humans and other mammals. The active therapeutic agents of the invention include modified nucleic acids, cells containing modified nucleic acids or polypeptides translated from the modified nucleic acids, polypeptides translated from modified nucleic acids, and cells contacted with cells containing modified nucleic acids or polypeptides translated from the modified nucleic acids.

[0435] In certain embodiments, provided are combination therapeutics containing one or more modified nucleic acids containing translatable regions that encode for a protein or proteins that boost a mammalian subject's immunity along with a protein that induces antibody-dependent cellular toxicity. For example, provided are therapeutics containing one or more nucleic acids that encode trastuzumab and granulocyte-colony stimulating factor (G-CSF). In particular, such combination therapeutics are useful in Her2+breast cancer patients who develop induced resistance to trastuzumab. (See, e.g., Albrecht, Immunotherapy. 2(6):795-8 (2010)).

[0436] Provided are methods of inducing translation of a recombinant polypeptide in a cell population using the modified nucleic acids described herein. Such translation can be in vivo, ex vivo, in culture, or in vitro. The cell population is contacted with an effective amount of a composition containing a nucleic acid that has at least one nucleoside modification, and a translatable region encoding the recombinant polypeptide. The population is contacted under conditions such that the nucleic acid is localized into one or more cells of the cell population and the recombinant polypeptide is translated in the cell from the nucleic acid.

[0437] An effective amount of the composition is provided based, at least in part, on the target tissue, target cell type, means of administration, physical characteristics of the nucleic acid (e.g., size, and extent of modified nucleosides), and other determinants. In general, an effective amount of the composition provides efficient protein production in the cell, preferably more efficient than a composition containing a corresponding unmodified nucleic acid. Increased efficiency may be demonstrated by increased cell transfection (i.e., the percentage of cells transfected with the nucleic acid), increased protein translation from the nucleic acid, decreased nucleic acid degradation (as demonstrated, e.g., by increased duration of protein translation from a modified nucleic acid), or reduced innate immune response of the host cell.

[0438] Aspects of the invention are directed to methods of inducing in vivo translation of a recombinant polypeptide in a mammalian subject in need thereof. Therein, an effective amount of a composition containing a nucleic acid that has at least one nucleoside modification and a translatable region encoding the recombinant polypeptide is administered to the subject using the delivery methods described herein. The nucleic acid is provided in an amount and under other conditions such that the nucleic acid is localized into a cell of the subject and the recombinant polypeptide is translated in the cell from the nucleic acid. The cell in which the nucleic acid is localized, or the tissue in which the cell is present, may be targeted with one or more than one rounds of nucleic acid administration.

[0439] Other aspects of the invention relate to transplantation of cells containing modified nucleic acids to a mammalian subject. Administration of cells to mammalian subjects is known to those of ordinary skill in the art, such as local implantation (e.g., topical or subcutaneous administration), organ delivery or systemic injection (e.g., intravenous injection or inhalation), as is the formulation of cells in pharmaceutically acceptable carrier. Compositions containing modified nucleic acids are formulated for administration intramuscularly, transarterially, intraocularly, vaginally, rectally, intraperitoneally, intravenously, intranasally, subcutaneously, endoscopically, transdermally, or intrathecally. In some embodiments, the composition is formulated for extended release.

[0440] The subject to whom the therapeutic agent is administered suffers from or is at risk of developing a disease, disorder, or deleterious condition. Provided are methods of identifying, diagnosing, and classifying subjects on these bases, which may include clinical diagnosis, biomarker levels, genome-wide association studies (GWAS), and other methods known in the art.

[0441] In certain embodiments, the administered modified nucleic acid directs production of one or more recombinant polypeptides that provide a functional activity which is substantially absent in the cell in which the recombinant polypeptide is translated. For example, the missing functional activity may be enzymatic, structural, or gene regulatory in nature. In related embodiments, the administered modified nucleic acid directs production of one or more recombinant polypeptides that increases (e.g., synergistically) a functional activity which is present but substantially deficient in the cell in which the recombinant polypeptide is translated.

[0442] In other embodiments, the administered modified nucleic acid directs production of one or more recombinant polypeptides that replace a polypeptide (or multiple polypeptides) that is substantially absent in the cell in which the recombinant polypeptide is translated. Such absence may be due to genetic mutation of the encoding gene or regulatory pathway thereof. In some embodiments, the recombinant polypeptide increases the level of an endogenous protein in the cell to a desirable level; such an increase may bring the level of the endogenous protein from a subnormal level to a normal level, or from a normal level to a super-normal level.

[0443] Alternatively, the recombinant polypeptide functions to antagonize the activity of an endogenous protein present in, on the surface of, or secreted from the cell. Usually, the activity of the endogenous protein is deleterious to the subject, for example, do to mutation of the endogenous protein resulting in altered activity or localization. Additionally, the recombinant polypeptide antagonizes, directly or indirectly, the activity of a biological moiety present in, on the surface of, or secreted from the cell. Examples of antagonized biological moieties include lipids (e.g., cholesterol), a lipoprotein (e.g., low density lipoprotein), a nucleic acid, a carbohydrate, a protein toxin such as shiga and tetanus toxins, or a small molecule toxin such as botulinum, cholera, and diphtheria toxins. Additionally, the antagonized biological molecule may be an endogenous protein that exhibits an undesirable activity, such as a cytotoxic or cytostatic activity. The recombinant proteins described herein are engineered for localization within the cell, potentially within a specific compartment such as the nucleus, or are engineered for secretion from the cell or translocation to the plasma membrane of the cell.

### Therapeutics

[0444] Provided are methods for treating or preventing a symptom of diseases characterized by missing or aberrant protein activity, by replacing the missing protein activity or overcoming the aberrant protein activity. Because of the rapid initiation of protein production following introduction of modified mRNAs, as compared to viral DNA vectors, the compounds of the present invention are particularly advantageous in treating acute diseases such as sepsis, stroke, and myocardial infarction. Moreover, the lack of transcriptional regulation of the modified mRNAs of the invention is advantageous in that accurate titration of protein production is achievable.

[0445] In some embodiments, modified mRNAs and their encoded polypeptides in accordance with the present invention may be used for therapeutic purposes. In some embodiments, modified mRNAs and their encoded polypeptides in accordance with the present invention may be used for treatment of any of a variety of diseases, disorders, and/or conditions, including but not limited to one or more of the following: autoimmune disorders (e.g. diabetes, lupus, multiple sclerosis, psoriasis, rheumatoid arthritis); inflammatory disorders (e.g. arthritis, pelvic inflammatory disease); infectious diseases (e.g. viral infections (e.g., HIV, HCV, RSV), bacterial infections, fungal infections, sepsis); neurological disorders (e.g. Alzheimer's disease, Huntington's disease; autism; Duchenne muscular dystrophy); cardiovascular disorders (e.g. atherosclerosis, hypercholesterolemia, thrombosis, clotting disorders, angiogenic disorders such as macular degeneration); proliferative disorders (e.g. cancer, benign neoplasms); respiratory disorders (e.g. chronic obstructive pulmonary disease); digestive disorders (e.g. inflammatory bowel disease, ulcers); musculoskeletal disorders (e.g. fibromyalgia, arthritis); endocrine, metabolic, and nutritional disorders (e.g. diabetes, osteoporosis); urological disorders (e.g. renal disease); psychological disorders (e.g. depression, schizophrenia); skin disorders (e.g. wounds, eczema); blood and lymphatic disorders (e.g. anemia, hemophilia); etc.

[0446] Diseases characterized by dysfunctional or aberrant protein activity include cystic fibrosis, sickle cell anemia, epidermolysis bullosa, amyotrophic lateral sclerosis, and glucose-6-phosphate dehydrogenase deficiency. The present invention provides a method for treating such conditions or diseases in a subject by introducing nucleic acid or cell-based therapeutics containing the modified nucleic acids provided herein, wherein the modified nucleic acids encode for a protein that antagonizes or otherwise overcomes the aberrant protein activity present in the cell of the subject. Specific examples of a dysfunctional protein are the missense mutation variants of the cystic fibrosis transmembrane conductance regulator (CFTR) gene, which produce a dysfunctional protein variant of CFTR protein, which causes cystic fibrosis.

[0447] Diseases characterized by missing (or substantially diminished such that proper protein function does not occur) protein activity include cystic fibrosis, Niemann-Pick type C, R thalassemia major, Duchenne muscular dystrophy, Hurler Syndrome, Hunter Syndrome, and Hemophilia A. Such proteins may not be present, or are essentially non-functional. The present invention provides a method for treating such conditions or diseases in a subject by introducing nucleic acid or cell-based therapeutics containing the modified nucleic acids provided herein, wherein the modified nucleic acids encode for a protein that replaces the protein activity missing from the target cells of the subject. Specific examples of a dysfunctional protein are the nonsense mutation variants of the cystic fibrosis transmembrane conductance regulator (CFTR) gene, which produce a nonfunctional protein variant of CFTR protein, which causes cystic fibrosis.

[0448] Thus, provided are methods of treating cystic fibrosis in a mammalian subject by contacting a cell of the subject with a modified nucleic acid having a translatable region that encodes a functional CFTR polypeptide, under conditions such that an effective amount of the CTFR polypeptide is present in the cell. Preferred target cells are epithelial, endothelial and mesothelial cells, such as the lung, and methods of administration are determined in view of the target tissue; i.e., for lung delivery, the RNA molecules are formulated for administration by inhalation.

[0449] In another embodiment, the present invention provides a method for treating hyperlipidemia in a subject, by introducing into a cell population of the subject with a modified mRNA molecule encoding Sortilin, a protein recently characterized by genomic studies, thereby ameliorating the hyperlipidemia in a subject. The SORT1 gene encodes a trans-Golgi network (TGN) transmembrane protein called Sortilin. Genetic studies have shown that one of five individuals has a single nucleotide polymorphism, rs12740374, in the 1p13 locus of the SORT1 gene that predisposes them to having low levels of low-density lipoprotein (LDL) and very-low-density lipoprotein (VLDL). Each copy of the minor allele, present in about 30% of people, alters LDL cholesterol by 8 mg/dL, while two copies of the minor allele, present in about 5% of the population, lowers LDL cholesterol 16 mg/dL. Carriers of the minor allele have also been shown to have a 40% decreased risk of myocardial infarction. Functional in vivo studies in mice describes that overexpression of SORT1 in mouse liver tissue led to significantly lower LDL-cholesterol levels, as much as 80% lower, and that silencing SORT1 increased LDL cholesterol approximately 200% (Musunuru K et al. From noncoding variant to phenotype via SORT1 at the 1p13 cholesterol locus. Nature 2010; 466: 714-721, herein incorporated by reference in its entirety.).

### Modulation of Cell Fate

[0450] Provided are methods of inducing an alteration in cell fate in a target mammalian cell. The target mammalian cell may be a precursor cell and the alteration may involve driving differentiation into a lineage, or blocking such differentiation. Alternatively, the target mammalian cell may be a differentiated cell, and the cell fate alteration includes driving de-differentiation into a pluripotent precursor cell, or blocking such de-differentiation, such as the dedifferentiation of cancer cells into cancer stem cells. In situations where a change in cell fate is desired, effective amounts of mRNAs encoding a cell fate inductive polypeptide is introduced into a target cell under conditions such that an alteration in cell fate is induced. In some embodiments, the modified mRNAs are useful to reprogram a subpopulation of cells from a first phenotype to a second phenotype. Such a reprogramming may be temporary or permanent.

[0451] Optionally, the reprogramming induces a target cell to adopt an intermediate phenotype.

[0452] Additionally, the methods of the present invention are particularly useful to generate induced pluripotent stem cells (iPS cells) because of the high efficiency of transfection, the ability to re-transfect cells, and the tenability of the amount of recombinant polypeptides produced in the target cells. Further, the use of iPS cells generated using the methods described herein is expected to have a reduced incidence of teratoma formation.

[0453] Also provided are methods of reducing cellular differentiation in a target cell population. For example, a target cell population containing one or more precursor cell types is contacted with a composition having an effective amount of a modified mRNA encoding a polypeptide, under conditions such that the polypeptide is translated and reduces the differentiation of the precursor cell. In non-limiting embodiments, the target cell population contains injured tissue in a mammalian subject or tissue affected by a surgical procedure. The precursor cell is, e.g., a stromal precursor cell, a neural precursor cell, or a mesenchymal precursor cell.

[0454] In a specific embodiment, provided are modified nucleic acids that encode one or more differentiation factors Gata4, Mef2c and Tbx4. These mRNA-generated factors are introduced into fibroblasts and drive the reprogramming into cardiomyocytes. Such a reprogramming can be performed in vivo, by contacting an mRNA-containing patch or other material to damaged cardiac tissue to facilitate cardiac regeneration. Such a process promotes cardiomyocyte genesis as opposed to fibrosis.

### Targeting of Pathogenic Organisms: Purification of Biological Materials

[0455] Provided herein are methods for targeting pathogenic microorganisms, such as bacteria, yeast, protozoa, helminthes and the like, using modified mRNAs that encode cytostatic or cytotoxic polypeptides. Preferably the mRNA introduced into the target pathogenic organism contains modified nucleosides or other nucleic acid sequence modifications that the mRNA is translated exclusively, or preferentially, in the target pathogenic organism, to reduce possible off-target effects of the therapeutic. Such methods are useful for removing pathogenic organisms from biological material, including blood, semen, eggs, and transplant materials including embryos, tissues, and organs.

### Targeting Diseased Cells

[0456] Provided herein are methods for targeting pathogenic or diseased cells, particularly cancer cells, using modified mRNAs that encode cytostatic or cytotoxic polypeptides. Preferably the mRNA introduced into the target pathogenic cell contains modified nucleosides or other nucleic acid sequence modifications that the mRNA is translated exclusively, or preferentially, in the target pathogenic cell, to reduce possible off-target effects of the therapeutic. Alternatively, the invention provides targeting moieties that are capable of targeting the modified mRNAs to preferentially bind to and enter the target pathogenic cell.

### Protein Production

[0457] The methods provided herein are useful for enhancing protein product yield in a cell culture process. In a cell culture containing a plurality of host cells, introduction of the modified mRNAs described herein results in increased protein production efficiency relative to a corresponding unmodified nucleic acid. Such increased protein production efficiency can be demonstrated, e.g., by showing increased cell transfection, increased protein translation from the nucleic acid, decreased nucleic acid degradation, and/or reduced innate immune response of the host cell. Protein production can be measured by ELISA, and protein activity can be measured by various functional assays known in the art. The protein production may be generated in a continuous or a fed-batch mammalian process.

[0458] Additionally, it is useful to optimize the expression of a specific polypeptide in a cell line or collection of cell lines of potential interest, particularly an engineered protein such as a protein variant of a reference protein having a known activity. In one embodiment, provided is a method of optimizing expression of an engineered protein in a target cell, by providing a plurality of target cell types, and independently contacting with each of the plurality of target cell types a modified mRNA encoding an engineered polypeptide. Additionally, culture conditions may be altered to increase protein production efficiency. Subsequently, the presence and/or level of the engineered polypeptide in the plurality of target cell types is detected and/or quantitated, allowing for the optimization of an engineered polypeptide's expression by selection of an efficient target cell and cell culture conditions relating thereto. Such methods are particularly useful when the engineered polypeptide contains one or more post-translational modifications or has substantial tertiary structure, situations which often complicate efficient protein production.

### Gene Silencing

[0459] The modified mRNAs described herein are useful to silence (i.e., prevent or substantially reduce) expression of one or more target genes in a cell population. A modified mRNA encoding a polypeptide capable of directing sequence-specific histone H3 methylation is introduced into the cells in the population under conditions such that the polypeptide is translated and reduces gene transcription of a target gene via histone H3 methylation and subsequent heterochromatin formation. In some embodiments, the silencing mechanism is performed on a cell population present in a mammalian subject. By way of non-limiting example, a useful target gene is a mutated Janus Kinase-2 family member, wherein the mammalian subject expresses the mutant target gene suffers from a myeloproliferative disease resulting from aberrant kinase activity.

[0460] Co-administration of modified mRNAs and siRNAs are also provided herein. As demonstrated in yeast, sequence-specific trans silencing is an effective mechanism for altering cell function. Fission yeast require two RNAi complexes for siRNA-mediated heterochromatin assembly: the RNA-induced transcriptional silencing (RITS) complex and the RNA-directed RNA polymerase complex (RDRC) (Motamedi et al. Cell 2004, 119, 789-802). In fission yeast, the RITS complex contains the siRNA binding Argonaute family protein Ago1, a chromodomain protein Chp1, and Tas3. The fission yeast RDRC complex is composed of an RNA-dependent RNA Polymerase Rdp1, a putative RNA helicase Hrr1, and a polyA polymerase family protein Cid12. These two complexes require the Dicer ribonuclease and Clr4 histone H3 methyltransferase for activity. Together, Ago1 binds siRNA molecules generated through Dicer-mediated cleavage of Rdp1 co-transcriptionally generated dsRNA transcripts and allows for the sequence-specific direct association of Chp1, Tas3, Hrr1, and Clr4 to regions of DNA destined for methylation and histone modification and subsequent compaction into transcriptionally silenced heterochromatin. While this mechanism functions in cis-with centromeric regions of DNA, sequence-specific trans silencing is possible through co-transfection with double-stranded siRNAs for specific regions of DNA and concomitant RNAi-directed silencing of the siRNA ribonuclease Eril (Buhler et al. Cell 2006, 125, 873-886, herein incorporated by reference in its entirety.).

### Modulation of Biological Pathways

[0461] The rapid translation of modified mRNAs introduced into cells provides a desirable mechanism of modulating target biological pathways. Such modulation includes antagonism or agonism of a given pathway. In one embodiment, a method is provided for antagonizing a biological pathway in a cell by contacting the cell with an effective amount of a composition comprising a modified nucleic acid encoding a recombinant polypeptide, under conditions such that the nucleic acid is localized into the cell and the recombinant polypeptide is capable of being translated in the cell from the nucleic acid, wherein the recombinant polypeptide inhibits the activity of a polypeptide functional in the biological pathway. Exemplary biological pathways are those defective in an autoimmune or inflammatory disorder such as multiple sclerosis, rheumatoid arthritis, psoriasis, lupus erythematosus, ankylosing spondylitis colitis, or Crohn's disease; in particular, antagonism of the IL-12 and IL-23 signaling pathways are of particular utility. (See Kikly K, Liu L, Na S, Sedgwick J D (2006) Curr. Opin. Immunol. 18 (6): 670-5, herein incorporated by reference in its entirety.).

[0462] Further, provided are modified nucleic acids encoding an antagonist for chemokine receptors; chemokine receptors CXCR-4 and CCR-5 are required for, e.g., HIV entry into host cells (Arenzana-Seisdedos F et al, (1996) Nature. Oct 3; 383(6599):400, herein incorporated by reference in its entirety.).

[0463] Alternatively, provided are methods of agonizing a biological pathway in a cell by contacting the cell with an effective amount of a modified nucleic acid encoding a recombinant polypeptide under conditions such that the nucleic acid is localized into the cell and the recombinant polypeptide is capable of being translated in the cell from the nucleic acid, and the recombinant polypeptide induces the activity of a polypeptide functional in the biological pathway. Exemplary agonized biological pathways include pathways that modulate cell fate determination. Such agonization is reversible or, alternatively, irreversible.

### Cellular Nucleic Acid Delivery

[0464] Methods of the present invention enhance nucleic acid delivery into a cell population, in vivo, ex vivo, or in culture. For example, a cell culture containing a plurality of host cells (e.g., eukaryotic cells such as yeast or mammalian cells) is contacted with a composition that contains an enhanced nucleic acid having at least one nucleoside modification and, optionally, a translatable region. The composition also generally contains a transfection reagent or other compound that increases the efficiency of enhanced nucleic acid uptake into the host cells. The enhanced nucleic acid exhibits enhanced retention in the cell population, relative to a corresponding unmodified nucleic acid. The retention of the enhanced nucleic acid is greater than the retention of the unmodified nucleic acid. In some embodiments, it is at least about 50%, 75%, 90%, 95%, 100%, 150%, 200% or more than 200% greater than the retention of the unmodified nucleic acid. Such retention advantage may be achieved by one round of transfection with the enhanced nucleic acid, or may be obtained following repeated rounds of transfection.

[0465] In some embodiments, the enhanced nucleic acid is delivered to a target cell population with one or more additional nucleic acids. Such delivery may be at the same time, or the enhanced nucleic acid is delivered prior to delivery of the one or more additional nucleic acids. The additional one or more nucleic acids may be modified nucleic acids or unmodified nucleic acids. It is understood that the initial presence of the enhanced nucleic acids does not substantially induce an innate immune response of the cell population and, moreover, that the innate immune response will not be activated by the later presence of the unmodified nucleic acids. In this regard, the enhanced nucleic acid may not itself contain a translatable region, if the protein desired to be present in the target cell population is translated from the unmodified nucleic acids.

### IV. Pharmaceutical Compositions

### Formulation, Administration, Delivery and Dosing

[0466] The present invention provides polynucleotides, modified nucleic acid, enhanced modified RNA and ribonucleic acid compositions and complexes in combination with one or more pharmaceutically acceptable excipients. Pharmaceutical compositions may optionally comprise one or more additional active substances, e.g. therapeutically and/or prophylactically active substances. General considerations in the formulation and/or manufacture of pharmaceutical agents may be found, for example, in Remington: The Science and Practice of Pharmacy 21^{st} ed., Lippincott Williams & Wilkins, 2005 (incorporated herein by reference).

[0467] In one embodiment, provided are formulations containing an effective amount of a ribonucleic acid (e.g., an mRNA or a nucleic acid containing an mRNA) engineered to avoid an innate immune response of a cell into which the ribonucleic acid enters. The ribonucleic acid generally includes a nucleotide sequence encoding a polypeptide of interest.

[0468] In some embodiments, compositions are administered to humans, human patients or subjects. For the purposes of the present disclosure, the phrase “active ingredient” generally refers to a modified nucleic acid, an enhanced nucleic acid or a ribonucleic acid to be delivered as described herein.

[0469] Although the descriptions of pharmaceutical compositions provided herein are principally directed to pharmaceutical compositions which are suitable for administration to humans, it will be understood by the skilled artisan that such compositions are generally suitable for administration to any other animal, e.g., to non-human animals, e.g. non-human mammals. Modification of pharmaceutical compositions suitable for administration to humans in order to render the compositions suitable for administration to various animals is well understood, and the ordinarily skilled veterinary pharmacologist can design and/or perform such modification with merely ordinary, if any, experimentation. Subjects to which administration of the pharmaceutical compositions is contemplated include, but are not limited to, humans and/or other primates; mammals, including commercially relevant mammals such as cattle, pigs, horses, sheep, cats, dogs, mice, and/or rats; and/or birds, including commercially relevant birds such as poultry, chickens, ducks, geese, and/or turkeys.

[0470] Formulations of the pharmaceutical compositions described herein may be prepared by any method known or hereafter developed in the art of pharmacology. In general, such preparatory methods include the step of bringing the active ingredient into association with an excipient and/or one or more other accessory ingredients, and then, if necessary and/or desirable, dividing, shaping and/or packaging the product into a desired single- or multi-dose unit.

[0471] A pharmaceutical composition in accordance with the invention may be prepared, packaged, and/or sold in bulk, as a single unit dose, and/or as a plurality of single unit doses. As used herein, a “unit dose” is discrete amount of the pharmaceutical composition comprising a predetermined amount of the active ingredient. The amount of the active ingredient is generally equal to the dosage of the active ingredient which would be administered to a subject and/or a convenient fraction of such a dosage such as, for example, one-half or one-third of such a dosage.

[0472] Relative amounts of the active ingredient, the pharmaceutically acceptable excipient, and/or any additional ingredients in a pharmaceutical composition in accordance with the invention will vary, depending upon the identity, size, and/or condition of the subject treated and further depending upon the route by which the composition is to be administered. By way of example, the composition may comprise between 0.1% and 100%, e.g., between 0.5 and 50%, between 1-30%, between 5-80%, at least 80% (w/w) active ingredient

### Formulations

[0473] The polynucleotides, modified nucleic acid, enhanced modified RNA and ribonucleic acid of the invention can be formulated using one or more excipients to: (1) increase stability; (2) increase cell transfection; (3) permit the sustained or delayed release (e.g., from a depot formulation of the modified nucleic acids, enhanced modified RNA or ribonucleic acids); (4) alter the biodistribution (e.g., target the modified nucleic acids, enhanced modified RNA or ribonucleic acids to specific tissues or cell types); (5) increase the translation of encoded protein in vivo; and/or (6) alter the release profile of encoded protein in vivo. In addition to traditional excipients such as any and all solvents, dispersion media, diluents, or other liquid vehicles, dispersion or suspension aids, surface active agents, isotonic agents, thickening or emulsifying agents, preservatives, excipients of the present invention can include, without limitation, lipidoids, liposomes, lipid nanoparticles, polymers, lipoplexes, core-shell nanoparticles, peptides, proteins, cells transfected with polynucleotides, modified nucleic acid, enhanced modified RNA and ribonucleic acid (e.g., for transplantation into a subject), hyaluronidase, nanoparticle mimics and combinations thereof.

[0474] Accordingly, the formulations of the invention can include one or more excipients, each in an amount that together increases the stability of the polynucleotide, modified nucleic acid, enhanced modified RNA or ribonucleic acid, increases cell transfection by the polynucleotides, modified nucleic acid, enhanced modified RNA or ribonucleic acid, increases the expression of polynucleotides, modified nucleic acid, enhanced modified RNA or ribonucleic acid encoded protein, and/or alters the release profile of the polynucleotides, modified nucleic acid, enhanced modified RNA or ribonucleic acid encoded proteins. Further, the polynucleotides, modified nucleic acid, enhanced modified RNA or ribonucleic acid of the present invention may be formulated using self-assembled nucleic acid nanoparticles.

[0475] Formulations of the pharmaceutical compositions described herein may be prepared by any method known or hereafter developed in the art of pharmacology. In general, such preparatory methods include the step of associating the active ingredient with an excipient and/or one or more other accessory ingredients.

[0476] The polynucleotides, modified nucleic acid, enhanced modified RNA and ribonucleic acid of the invention may be formulated for delivery in the tissues and/or organs of a subject. Organs may include, but are not limited to, the heart, lung, brain, liver, basal ganglia, brain stem medulla, midbrain, pons, cerebellum, cerebral cortex, hypothalamus, eye, pituitary, thyroid, parathyroid, esophagus, thymus, adrenal glands, appendix, bladder, gallbladder, intestines (e.g., large intestine and small intestine), kidney, pancreas, spleen, stomach, skin, prostate, testes, ovaries, uterus, adrenal glands, anus, bronchi, ears, esophagus, genitals, larynx (voice box), lymph nodes, meninges, mouth, nose, parathyroid glands, pituitary gland, rectum, salivary glands, spinal cord, thymus gland, tongue, trachea, ureters, urethra, colon. Tissues may include, but are not limited to, heart valves, bone, vein, middle ear, muscle (cardiac, smooth or skeletal) cartilage, tendon or ligaments. As a non-limiting example, the polynucleotides, modified nucleic acid, enhanced modified RNA and ribonucleic acid may be formulated in a lipid nanoparticle and delivered to an organ such as, but not limited, to the liver, spleen, kidney or lung. In another non-limiting example, the polynucleotides, modified nucleic acids, enhanced modified RNA and ribonucleic acid may be formulated in a lipid nanoparticle comprising the cationic lipid DLin-KC2-DMA and delivered to an organ such as, but not limited to, the liver, spleen, kidney or lung.

[0477] A pharmaceutical composition in accordance with the present disclosure may be prepared, packaged, and/or sold in bulk, as a single unit dose, and/or as a plurality of single unit doses. As used herein, a “unit dose” refers to a discrete amount of the pharmaceutical composition comprising a predetermined amount of the active ingredient. The amount of the active ingredient may generally be equal to the dosage of the active ingredient which would be administered to a subject and/or a convenient fraction of such a dosage including, but not limited to, one-half or one-third of such a dosage.

[0478] Relative amounts of the active ingredient, the pharmaceutically acceptable excipient, and/or any additional ingredients in a pharmaceutical composition in accordance with the present disclosure may vary, depending upon the identity, size, and/or condition of the subject being treated and further depending upon the route by which the composition is to be administered. For example, the composition may comprise between 0.1% and 99% (w/w) of the active ingredient.

[0479] In some embodiments, the modified mRNA formulations described herein may contain at least one modified mRNA. The formulations may contain 1, 2, 3, 4 or 5 modified mRNA. In one embodiment the formulation may contain modified mRNA encoding proteins selected from categories such as, but not limited to, human proteins, veterinary proteins, bacterial proteins, biological proteins, antibodies, immunogenic proteins, therapeutic peptides and proteins, secreted proteins, plasma membrane proteins, cytoplasmic and cytoskeletal proteins, intracellular membrane bound proteins, nuclear proteins, proteins associated with human disease and/or proteins associated with non-human diseases. In one embodiment, the formulation contains at least three modified mRNA encoding proteins. In one embodiment, the formulation contains at least five modified mRNA encoding proteins.

[0480] Pharmaceutical formulations may additionally comprise a pharmaceutically acceptable excipient, which, as used herein, includes, but is not limited to, any and all solvents, dispersion media, diluents, or other liquid vehicles, dispersion or suspension aids, surface active agents, isotonic agents, thickening or emulsifying agents, preservatives, and the like, as suited to the particular dosage form desired. Various excipients for formulating pharmaceutical compositions and techniques for preparing the composition are known in the art (see Remington: The Science and Practice of Pharmacy, 21^{st} Edition, A. R. Gennaro, Lippincott, Williams & Wilkins, Baltimore, MD, 2006; incorporated herein by reference). The use of a conventional excipient medium may be contemplated within the scope of the present disclosure, except insofar as any conventional excipient medium may be incompatible with a substance or its derivatives, such as by producing any undesirable biological effect or otherwise interacting in a deleterious manner with any other component(s) of the pharmaceutical composition.

[0481] In some embodiments, the particle size of the lipid nanoparticle may be increased and/or decreased. The change in particle size may be able to help counter biological reaction such as, but not limited to, inflammation or may increase the biological effect of the modified mRNA delivered to mammals.

[0482] Pharmaceutically acceptable excipients used in the manufacture of pharmaceutical compositions include, but are not limited to, inert diluents, surface active agents and/or emulsifiers, preservatives, buffering agents, lubricating agents, and/or oils. Such excipients may optionally be included in the pharmaceutical formulations of the invention

### Lipidoid

[0483] The synthesis of lipidoids has been extensively described and formulations containing these compounds are particularly suited for delivery of polynucleotides, modified nucleic acids, enhanced modified RNA and ribonucleic acids (see Mahon et al., Bioconjug Chem. 2010 21:1448-1454; Schroeder et al., J Intern Med. 2010 267:9-21; Akinc et al., Nat Biotechnol. 2008 26:561-569; Love et al., Proc Natl Acad Sci USA. 2010 107:1864-1869; Siegwart et al., Proc Natl Acad Sci USA. 2011 108:12996-3001; all of which are incorporated herein in their entireties).

[0484] While these lipidoids have been used to effectively deliver double stranded small interfering RNA molecules in rodents and non-human primates (see Akinc et al., Nat Biotechnol. 2008 26:561-569; Frank-Kamenetsky et al., Proc Natl Acad Sci USA. 2008 105:11915-11920; Akinc et al., Mol Ther. 2009 17:872-879; Love et al., Proc Natl Acad Sci USA. 2010 107:1864-1869; Leuschner et al., Nat Biotechnol. 2011 29:1005-1010; all of which is incorporated herein in their entirety), the present disclosure describes their formulation and use in delivering single stranded polynucleotide, modified nucleic acids, enhanced modified RNA and ribonucleic acids. Complexes, micelles, liposomes or particles can be prepared containing these lipidoids and therefore, can result in an effective delivery of the polynucleotides, modified nucleic acids, enhanced modified RNA and ribonucleic acids, as judged by the production of an encoded protein, following the injection of a lipidoid formulation via localized and/or systemic routes of administration. Lipidoid complexes of polynucleotides, modified nucleic acids, enhanced modified RNA and ribonucleic acids can be administered by various means including, but not limited to, intravenous, intramuscular, or subcutaneous routes.

[0485] In vivo delivery of nucleic acids may be affected by many parameters, including, but not limited to, the formulation composition, nature of particle PEGylation, degree of loading, oligonucleotide to lipid ratio, and biophysical parameters such as particle size (Akinc et al., Mol Ther. 2009 17:872-879; herein incorporated by reference in its entirety). As an example, small changes in the anchor chain length of poly(ethylene glycol) (PEG) lipids may result in significant effects on in vivo efficacy. Formulations with the different lipidoids, including, but not limited to penta[3-(1-laurylaminopropionyl)]-triethylenetetramine hydrochloride (TETA-5LAP; aka 98N12-5, see Murugaiah et al., Analytical Biochemistry, 401:61 (2010)), C12-200 (including derivatives and variants), and MD1, can be tested for in vivo activity.

[0486] The lipidoid referred to herein as “98N12-5” is disclosed by Akinc et al., Mol Ther. 2009 17:872-879 and is incorporated by reference in its entirety.

[0487] The lipidoid referred to herein as “C12-200” is disclosed by Love et al., Proc Natl Acad Sci USA. 2010 107:1864-1869 and Liu and Huang, Molecular Therapy. 2010 669-670; both of which are herein incorporated by reference in their entirety. The lipidoid formulations can include particles comprising either 3 or 4 or more components in addition to polynucleotide, modified nucleic acids, enhanced modified RNA and ribonucleic acids. As an example, formulations with certain lipidoids, include, but are not limited to, 98N12-5 and may contain 42% lipidoid, 48% cholesterol and 10% PEG (C14 alkyl chain length). As another example, formulations with certain lipidoids, include, but are not limited to, C12-200 and may contain 50% lipidoid, 10% disteroylphosphatidyl choline, 38.5% cholesterol, and 1.5% PEG-DMG.

[0488] In one embodiment, a modified nucleic acids, enhanced modified RNA or ribonucleic acids formulated with a lipidoid for systemic intravenous administration can target the liver. For example, a final optimized intravenous formulation using modified nucleic acids, enhanced modified RNA or ribonucleic acids, and comprising a lipid molar composition of 42% 98N12-5, 48% cholesterol, and 10% PEG-lipid with a final weight ratio of about 7.5 to 1 total lipid to polynucleotide, modified nucleic acids, enhanced modified RNA or ribonucleic acids, and a C14 alkyl chain length on the PEG lipid, with a mean particle size of roughly 50-60 nm, can result in the distribution of the formulation to be greater than 90% to the liver. (see, Akinc et al., Mol Ther. 2009 17:872-879; herein incorporated in its entirety). In another example, an intravenous formulation using a C12-200 (see U.S. provisional application 61/175,770 and published international application WO2010129709, each of which is herein incorporated by reference in their entirety) lipidoid may have a molar ratio of 50/10/38.5/1.5 of C12-200/disteroylphosphatidyl choline/cholesterol/PEG-DMG, with a weight ratio of 7 to 1 total lipid to polynucleotide, modified nucleic acids, enhanced modified RNA or ribonucleic acids, and a mean particle size of 80 nm may be effective to deliver polynucleotides, modified nucleic acids, enhanced modified RNA or ribonucleic acids to hepatocytes (see, Love et al., Proc Natl Acad Sci USA. 2010 107:1864-1869 herein incorporated by reference). In another embodiment, an MD1 lipidoid-containing formulation may be used to effectively deliver polynucleotides, modified nucleic acids, enhanced modified RNA or ribonucleic acids to hepatocytes in vivo. The characteristics of optimized lipidoid formulations for intramuscular or subcutaneous routes may vary significantly depending on the target cell type and the ability of formulations to diffuse through the extracellular matrix into the blood stream. While a particle size of less than 150 nm may be desired for effective hepatocyte delivery due to the size of the endothelial fenestrae (see, Akinc et al., Mol Ther. 2009 17:872-879 herein incorporated by reference), use of a lipidoid-formulated polynucleotides, modified nucleic acids, enhanced modified RNA or ribonucleic acids to deliver the formulation to other cells types including, but not limited to, endothelial cells, myeloid cells, and muscle cells may not be similarly size-limited. Use of lipidoid formulations to deliver siRNA in vivo to other non-hepatocyte cells such as myeloid cells and endothelium has been reported (see Akinc et al., Nat Biotechnol. 2008 26:561-569; Leuschner et al., Nat Biotechnol. 2011 29:1005-1010; Cho et al. Adv. Funct. Mater. 2009 19:3112-3118; 8th International Judah Folkman Conference, Cambridge, MA Oct. 8-9, 2010 herein incorporated by reference in its entirety). Effective delivery to myeloid cells, such as monocytes, lipidoid formulations may have a similar component molar ratio. Different ratios of lipidoids and other components including, but not limited to, disteroylphosphatidyl choline, cholesterol and PEG-DMG, may be used to optimize the formulation of the polynucleotides, modified nucleic acids, enhanced modified RNA or ribonucleic acids for delivery to different cell types including, but not limited to, hepatocytes, myeloid cells, muscle cells, etc. For example, the component molar ratio may include, but is not limited to, 50% C12-200, 10% disteroylphosphatidyl choline, 38.5% cholesterol, and %1.5 PEG-DMG (see Leuschner et al., Nat Biotechnol 2011 29:1005-1010; herein incorporated by reference in its entirety). The use of lipidoid formulations for the localized delivery of nucleic acids to cells (such as, but not limited to, adipose cells and muscle cells) via either subcutaneous or intramuscular delivery, may not require all of the formulation components desired for systemic delivery, and as such may comprise only the lipidoid and the polynucleotides, modified nucleic acids, enhanced modified RNA or ribonucleic acids.

[0489] Combinations of different lipidoids may be used to improve the efficacy of polynucleotides, modified nucleic acids, enhanced modified RNA or ribonucleic acids directed protein production as the lipidoids may be able to increase cell transfection by the polynucleotides, modified nucleic acid, or modified nucleic acids, enhanced modified RNA or ribonucleic acids; and/or increase the translation of encoded protein (see Whitehead et al., Mol. Ther. 2011, 19:1688-1694, herein incorporated by reference in its entirety).

### Liposomes, Lipoplexes, and Lipid Nanoparticles

[0490] The polynucleotides, modified nucleic acids, enhanced modified RNA or ribonucleic acids of the invention can be formulated using one or more liposomes, lipoplexes, or lipid nanoparticles. In one embodiment, pharmaceutical compositions of polynucleotides, modified nucleic acids, enhanced modified RNA or ribonucleic acids include liposomes. Liposomes are artificially-prepared vesicles which may primarily be composed of a lipid bilayer and may be used as a delivery vehicle for the administration of nutrients and pharmaceutical formulations. Liposomes can be of different sizes such as, but not limited to, a multilamellar vesicle (MLV) which may be hundreds of nanometers in diameter and may contain a series of concentric bilayers separated by narrow aqueous compartments, a small unicellular vesicle (SUV) which may be smaller than 50 nm in diameter, and a large unilamellar vesicle (LUV) which may be between 50 and 500 nm in diameter. Liposome design may include, but is not limited to, opsonins or ligands in order to improve the attachment of liposomes to unhealthy tissue or to activate events such as, but not limited to, endocytosis. Liposomes may contain a low or a high pH in order to improve the delivery of the pharmaceutical formulations.

[0491] The formation of liposomes may depend on the physicochemical characteristics such as, but not limited to, the pharmaceutical formulation entrapped and the liposomal ingredients, the nature of the medium in which the lipid vesicles are dispersed, the effective concentration of the entrapped substance and its potential toxicity, any additional processes involved during the application and/or delivery of the vesicles, the optimization size, polydispersity and the shelf-life of the vesicles for the intended application, and the batch-to-batch reproducibility and possibility of large-scale production of safe and efficient liposomal products.

[0492] In one embodiment, pharmaceutical compositions described herein may include, without limitation, liposomes such as those formed from 1,2-dioleyloxy-N,N-dimethylaminopropane (DODMA) liposomes, DiLa2 liposomes from Marina Biotech (Bothell, WA), 1,2-dilinoleyloxy-3-dimethylaminopropane (DLin-DMA), 2,2-dilinoleyl-4-(2-dimethylaminoethyl)-[1,3]-dioxolane (DLin-KC2-DMA), and MC3 (US20100324120; herein incorporated by reference in its entirety) and liposomes which may deliver small molecule drugs such as, but not limited to, DOXIL® from Janssen Biotech, Inc. (Horsham, PA).In one embodiment, pharmaceutical compositions described herein may include, without limitation, liposomes such as those formed from the synthesis of stabilized plasmid-lipid particles (SPLP) or stabilized nucleic acid lipid particle (SNALP) that have been previously described and shown to be suitable for oligonucleotide delivery in vitro and in vivo (see Wheeler et al. Gene Therapy. 1999 6:271-281; Zhang et al. Gene Therapy. 1999 6:1438-1447; Jeffs et al. Pharm Res. 2005 22:362-372; Morrissey et al., Nat Biotechnol. 2005 2:1002-1007; Zimmermann et al., Nature. 2006 441:111-114; Heyes et al. J Contr Rel. 2005 107:276-287; Semple et al. Nature Biotech. 2010 28:172-176; Judge et al. J Clin Invest. 2009 119:661-673; deFougerolles Hum Gene Ther. 2008 19:125-132; all of which are incorporated herein in their entireties.) The original manufacture method by Wheeler et al. was a detergent dialysis method, which was later improved by Jeffs et al. and is referred to as the spontaneous vesicle formation method. The liposome formulations are composed of 3 to 4 lipid components in addition to the polynucleotides, modified nucleic acids, enhanced modified RNA or ribonucleic acids. As an example a liposome can contain, but is not limited to, 55% cholesterol, 20% disteroylphosphatidyl choline (DSPC), 10% PEG-S-DSG, and 15% 1,2-dioleyloxy-N,N-dimethylaminopropane (DODMA), as described by Jeffs et al. As another example, certain liposome formulations may contain, but are not limited to, 48% cholesterol, 20% DSPC, 2% PEG-c-DMA, and 30% cationic lipid, where the cationic lipid can be 1,2-distearloxy-N,N-dimethylaminopropane (DSDMA), DODMA, DLin-DMA, or 1,2-dilinolenyloxy-3-dimethylaminopropane (DLenDMA), as described by Heyes et al.

[0493] In one embodiment, pharmaceutical compositions may include liposomes which may be formed to deliver polynucleotides, modified nucleic acids, enhanced modified RNA and ribonucleic acids which may encode at least one immunogen. The polynucleotides, modified nucleic acids, enhanced modified RNA and ribonucleic acids may be encapsulated by the liposome and/or it may be contained in an aqueous core which may then be encapsulated by the liposome (see International Pub. Nos. WO2012031046, WO2012031043, WO2012030901 and WO2012006378; each of which is herein incorporated by reference in their entirety). In another polynucleotides, embodiment, the modified nucleic acids, enhanced modified RNA and ribonucleic acids which may encode an immunogen may be formulated in a cationic oil-in-water emulsion where the emulsion particle comprises an oil core and a cationic lipid which can interact with the polynucleotides, modified nucleic acids, enhanced modified RNA and ribonucleic acids anchoring the molecule to the emulsion particle (see International Pub. No. WO2012006380). In yet another embodiment, the lipid formulation may include at least cationic lipid, a lipid which may enhance transfection and a least one lipid which contains a hydrophilic head group linked to a lipid moiety (International Pub. No. WO2011076807 and U.S. Pub. No. 20110200582; each of which is herein incorporated by reference in their entirety). In another embodiment, the polynucleotides, modified nucleic acids, enhanced modified RNA or ribonucleic acids encoding an immunogen may be formulated in a lipid vesicle which may have crosslinks between functionalized lipid bilayers (see U.S. Pub. No. 20120177724, herein incorporated by reference in its entirety).

[0494] In one embodiment, the polynucleotides, modified nucleic acids, enhanced modified RNA or ribonucleic acids may be formulated in a lipid vesicle which may have crosslinks between functionalized lipid bilayers.

[0495] In one embodiment, the polynucleotides, modified nucleic acids, enhanced modified RNA or ribonucleic acids may be formulated in a lipid-polycation complex. The formation of the lipid-polycation complex may be accomplished by methods known in the art and/or as described in U.S. Pub. No. 20120178702, herein incorporated by reference in its entirety. As a non-limiting example, the polycation may include a cationic peptide or a polypeptide such as, but not limited to, polylysine, polyornithine and/or polyarginine. In another embodiment, the polynucleotide, modified nucleic acids, enhanced modified RNA or ribonucleic acids may be formulated in a lipid-polycation complex which may further include a neutral lipid such as, but not limited to, cholesterol or dioleoyl phosphatidylethanolamine (DOPE).

[0496] The liposome formulation may be influenced by, but not limited to, the selection of the cationic lipid component, the degree of cationic lipid saturation, the nature of the PEGylation, ratio of all components and biophysical parameters such as size. In one example by Semple et al. (Semple et al. Nature Biotech. 2010 28:172-176), the liposome formulation was composed of 57.1% cationic lipid, 7.1% dipalmitoylphosphatidylcholine, 34.3% cholesterol, and 1.4% PEG-c-DMA. As another example, changing the composition of the cationic lipid could more effectively deliver siRNA to various antigen presenting cells (Basha et al. Mol Ther. 2011 19:2186-2200; herein incorporated by reference in its entirety).

[0497] In some embodiments, the ratio of PEG in the LNP formulations may be increased or decreased and/or the carbon chain length of the PEG lipid may be modified from C14 to C18 to alter the pharmacokinetics and/or biodistribution of the LNP formulations. As a non-limiting example, LNP formulations may contain 1-5% of the lipid molar ratio of PEG-c-DOMG as compared to the cationic lipid, DSPC and cholesterol. In another embodiment the PEG-c-DOMG may be replaced with a PEG lipid such as, but not limited to, PEG-DSG (1,2-Distearoyl-sn-glycerol, methoxypolyethylene glycol) or PEG-DPG (1,2-Dipalmitoyl-sn-glycerol, methoxypolyethylene glycol). The cationic lipid may be selected from any lipid known in the art such as, but not limited to, DLin-MC3-DMA, DLin-DMA, C12-200 and DLin-KC2-DMA.

[0498] In one embodiment, the cationic lipid may be selected from, but not limited to, a cationic lipid described in International Publication Nos. WO2012040184, WO2011153120, WO2011149733, WO2011090965, WO2011043913, WO2011022460, WO2012061259, WO2012054365, WO2012044638, WO2010080724, WO201021865 and WO2008103276, U.S. Pat. Nos. 7,893,302 and 7,404,969 and US Patent Publication No. US20100036115; each of which is herein incorporated by reference in their entirety. In another embodiment, the cationic lipid may be selected from, but not limited to, formula A described in International Publication Nos. WO2012040184, WO2011153120, WO2011149733, WO2011090965, WO2011043913, WO2011022460, WO2012061259, WO2012054365 and WO2012044638; each of which is herein incorporated by reference in their entirety. In yet another embodiment, the cationic lipid may be selected from, but not limited to, formula CLI-CLXXIX of International Publication No. WO2008103276, formula CLI-CLXXIX of U.S. Pat. No. 7,893,302, formula CLI-CLXXXXII of U.S. Pat. No. 7,404,969 and formula I-VI of US Patent Publication No. US20100036115; each of which is herein incorporated by reference in their entirety. As a non-limiting example, the cationic lipid may be selected from (20Z,23Z)-N,N-dimethylnonacosa-20,23-dien-10-amine, (17Z,20Z)-N,N-dimemylhexacosa-17,20-dien-9-amine, (1 Z, 19Z)—N5N-dimethylpentacosa-16,19-dien-8-amine, (13Z,16Z)-N,N-dimethyldocosa-13J16-dien-5-amine, (12Z,15Z)-NJN-dimethylhenicosa-12,15-dien-4-amine, (14Z,17Z)-N,N-dimethyltricosa-14,17-dien-6-amine, (15Z,18Z)-N,N-dimethyltetracosa-15,18-dien-7-amine, (18Z,21Z)-N,N-dimethylheptacosa-18,21-dien-10-amine, (15Z,18Z)-N,N-dimethyltetracosa-15,18-dien-5-amine, (14Z,17Z)-N,N-dimethyltricosa-14,17-dien-4-amine, (19Z,22Z)-N,N-dimeihyloctacosa-19,22-dien-9-amine, (18Z,21 Z)-N,N-dimethylheptacosa-18,21-dien-8-amine, (17Z,20Z)-N,N-dimethylhexacosa-17,20-dien-7-amine, (16Z;19Z)-N,N-dimethylpentacosa-16,19-dien-6-amine, (22Z,25Z)-N,N-dimethylhentriaconta-22,25-dien-10-amine, (21 Z,24Z)-N;N-dimethyltriaconta-21,24-dien-9-amine, (18Z)-N,N-dimetylheptacos-18-en-10-amine, (17Z)-N,N-dimethylhexacos-17-en-9-amine, (19Z,22Z)—NJN-dimethyloctacosa-19,22-dien-7-amine, N,N-dimethylheptacosan-10-amine, (20Z,23Z)—N-ethyl-N-methylnonacosa-20J23-dien-10-amine, 1-[(1 lZ,14Z)-1-nonylicosa-11,14-dien-1-yl]pyrrolidine, (20Z)-N,N-dimethylheptacos-20-en-10-amine, (15Z)-N,N-dimethyl eptacos-15-en-10-amine, (14Z)-N,N-dimethylnonacos-14-en-10-amine, (17Z)-N,N-dimethylnonacos-17-en-10-amine, (24Z)-N,N-dimethyltritriacont-24-en-10-amine, (20Z)-N,N-dimethylnonacos-20-en-10-amine, (22Z)-N,N-dimethylhentriacont-22-en-10-amine, (16Z)-N,N-dimethylpentacos-16-en-8-amine, (12Z,15Z)-N,N-dimethyl-2-nonylhenico sa-12,15-dien-1-amine, (13Z,16Z)-N,N-dimethyl-3-nonyldocosa-13,16-dien-1-amine, N,N-dimethyl-1-[(1 S,2R)-2-octylcyclopropyl]eptadecan-8-amine, 1-[(1 S,2R)-2-hexylcyclopropyl]-N,N-dimethylnonadecan-10-amine, N,N-dimethyl-1-[(1 S,2R)-2-octylcyclopropyl]nonadecan-10-amine, N,N-dimethyl-21˜[(1S,2R)-2-octylcyclopropyl]henicosan-10-amine, N,N-dimethyl-1-[(1 S,2S)-2-{[(1R,2R)-2-pentylcyclopropyl]methyl}cyclopropyl]nonadecan-10-amine, N,N-dimethyl-1-[(1 S,2R)-2-octylcyclopropyl]hexadecan-8-amine, N,N-dimethyH-[(1R,2S)-2-undecylcyclopropyl]tetradecan-5-amine, N,N-dimethyl-3-17-[(1 S,2R)-2-octylcyclopropyl]heptyl}dodecan-1-amine, 1-[(1R,2 S)-2-heptylcyclopropy 1]-N,N-dimethyloctadecan-9-amine, 1-[(1 S,2R)-2-decylcyclopropyl]-N,N-dimethylpentadecan-6-amine, N,N-dimethyl-1-[(1S,2R)-2-octylcyclopropyl]pentadecan-8-amine, R-N,N-dimethyl-1-[(9Z,12Z)-octadeca-9,12-dien-1-yloxy]-3-(octyloxy)propan-2-amine, S-N,N-dimethyl-1-[(9Z,12Z)-octadeca-9,12-dien-1-yloxy]-3-(octyloxy)propan-2-amine, 1-12-[(9Z,12Z)-octadeca-9,12-dien-1-yloxy]-1-[(octyloxy) methyl]ethy}Ipyrrolidine, (2S)-N,N-dimethyl-1-[(9Z,12Z)-octadeca-9,12-dien-1-yloxy]-3-[(5Z)-oct-5-en-1-yloxy]propan-2-amine, 1-12-[(9Z,12Z)-octadeca-9,12-dien-1-yloxy]-1-[(octyloxy) methyl]ethyl}azetidine, (2S)-1-(hexyloxy)-N,N-dimethyl-3-[(9Z,12Z)-octadeca-9,12-dien-1-yloxy]propan-2-amine, (2S)-1-(heptyloxy)-N,N-dimethyl-3-[(9Z,12Z)-octadeca-9,12-dien-1-yloxy]propan-2-amine, N,N-dimethyl-1-(nonyloxy)-3-[(9Z,12Z)-octadeca-9,12-dien-1-yloxy]propan-2-amine, N,N-dimethyl-1-[(9Z)-octadec-9-en-1-yloxy]-3-(octyloxy)propan-2-amine (Compound 9); (2S)-N,N-dimethyl-1-[(6Z,9Z,12Z)-octadeca-6,9,12-trien-1-yloxy]-3-(octyloxy)propan-2-amine, (2S)-1-[(11Z,14Z)-icosa-11,14-dien-1-yloxy]-N,N-dimethyl-3-(pentyloxy)propan-2-amine, (2S)-1-(hexyloxy)-3-[(11Z,14Z)-icosa-11,14-dien-1-yloxy]-N,N-dimethylpropan-2-amine, 1-[(11Z,14Z)-icosa-11,14-dien-1-yloxy]-N,N-dimethyl-3-(octyloxy)propan-2-amine, 1-[(13Z,16Z)-docosa-13,16-dien-1-yloxy]-N,N-dimethyl-3-(octyloxy)propan-2-amine, (2S)-1-[(13Z,16Z)-docosa-13,16-dien-1-yloxy]-3-(hexyloxy)-N,N-dimethylpropan-2-amine, (2S)-1-[(13Z)-docos-13-en-1-yloxy]-3-(hexyloxy)-N,N-dimethylpropan-2-amine, 1-[(13Z)-docos-13-en-1-yloxy]-N,N-dimethyl-3-(octyloxy)propan-2-amine, 1-[(9Z)-hexadec-9-en-1-yloxy]-N,N-dimethyl-3-(octyloxy)propan-2-amine, (2R)-N,N-dimethyl-H(1-metoylo ctyl)oxy]-3-[(9Z,12Z)-octadeca-9,12-dien-1-yloxy]propan-2-amine, (2R)-1-[(3,7-dimethyloctyl)oxy]-N,N-dimethyl-3-[(9Z,12Z)-octadeca-9,12-dien-1-yloxy]propan-2-amine, N,N-dimethyl-1-(octyloxy)-3-({8-[(1S,2S)-2-{[(1R,2R)-2-pentylcyclopropyl]methyl}cyclopropyl]octyl}oxy)propan-2-amine, N,N-dimethyl-1-1[8-(2-oclylcyclopropyl)octyl]oxy}-3-(octyloxy)propan-2-amine and (11E,20Z,23Z)-N;N-dimethylnonacosa-11,20,2-trien-10-amine or a pharmaceutically acceptable salt or stereoisomer thereof.

[0499] In one embodiment, the cationic lipid may be synthesized by methods known in the art and/or as described in International Publication Nos. WO2012040184, WO2011153120, WO2011149733, WO2011090965, WO2011043913, WO2011022460, WO2012061259, WO2012054365, WO2012044638, WO2010080724 and WO201021865; each of which is herein incorporated by reference in their entirety.

[0500] In one embodiment, the LNP formulation may contain PEG-c-DOMG 3% lipid molar ratio. In another embodiment, the LNP formulation may contain PEG-c-DOMG 1.5% lipid molar ratio.

[0501] In one embodiment, the LNP formulation may contain PEG-DMG 2000 (1,2-dimyristoyl-sn-glycero-3-phophoethanolamine-N-[methoxy(polyethylene glycol)-2000). In one embodiment, the LNP formulation may contain PEG-DMG 2000, a cationic lipid known in the art and at least one other component. In another embodiment, the LNP formulation may contain PEG-DMG 2000, a cationic lipid known in the art, DSPC and cholesterol. As a non-limiting example, the LNP formulation may contain PEG-DMG 2000, DLin-DMA, DSPC and cholesterol. As another non-limiting example the LNP formulation may contain PEG-DMG 2000, DLin-DMA, DSPC and cholesterol in a molar ratio of 2:40:10:48 (see Geall et al., Nonviral delivery of self-amplifying RNA vaccines, PNAS 2012; PMID: 22908294).

[0502] In one embodiment, the LNP formulation may be formulated by the methods described in International Publication Nos. WO2011127255 or WO2008103276, each of which is herein incorporated by reference in their entirety. As a non-limiting example, modified RNA described herein may be encapsulated in LNP formulations as described in WO2011127255 and/or WO2008103276; each of which is herein incorporated by reference in their entirety.

[0503] In one embodiment, LNP formulations described herein may comprise a polycationic composition. As a non-limiting example, the polycationic composition may be selected from formula 1-60 of US Patent Publication No. US20050222064; herein incorporated by reference in its entirety. In another embodiment, the LNP formulations comprising a polycationic composition may be used for the delivery of the modified RNA described herein in vivo and/or in vitro.

[0504] In one embodiment, the LNP formulations described herein may additionally comprise a permeability enhancer molecule. Non-limiting permeability enhancer molecules are described in US Patent Publication No. US20050222064; herein incorporated by reference in its entirety.

[0505] In one embodiment, the pharmaceutical compositions may be formulated in liposomes such as, but not limited to, DiLa2 liposomes (Marina Biotech, Bothell, WA), SMARTICLES® (Marina Biotech, Bothell, WA), neutral DOPC (1,2-dioleoyl-sn-glycero-3-phosphocholine) based liposomes (e.g., siRNA delivery for ovarian cancer (Landen et al. Cancer Biology & Therapy 2006 5(12)1708-1713)) and hyaluronan-coated liposomes (Quiet Therapeutics, Israel).

[0506] Lipid nanoparticle formulations may be improved by replacing the cationic lipid with a biodegradable cationic lipid which is known as a rapidly eliminated lipid nanoparticle (reLNP). Ionizable cationic lipids, such as, but not limited to, DLinDMA, DLin-KC2-DMA, and DLin-MC3-DMA, have been shown to accumulate in plasma and tissues over time and may be a potential source of toxicity. The rapid metabolism of the rapidly eliminated lipids can improve the tolerability and therapeutic index of the lipid nanoparticles by an order of magnitude from a 1 mg/kg dose to a 10 mg/kg dose in rat. Inclusion of an enzymatically degraded ester linkage can improve the degradation and metabolism profile of the cationic component, while still maintaining the activity of the reLNP formulation. The ester linkage can be internally located within the lipid chain or it may be terminally located at the terminal end of the lipid chain. The internal ester linkage may replace any carbon in the lipid chain.

[0507] In one embodiment, the internal ester linkage may be located on either side of the saturated carbon. Non-limiting examples of reLNPs include,

[chemical structure]

[0508] In one embodiment, an immune response may be elicited by delivering a lipid nanoparticle which may include a nanospecies, a polymer and an immunogen. (U.S. Publication No. 20120189700 and International Publication No. WO2012099805; each of which is herein incorporated by reference in their entirety). The polymer may encapsulate the nanospecies or partially encapsulate the nanospecies. The immunogen may be a recombinant protein, a modified RNA described herein. In one embodiment, the lipid nanoparticle may be formulated for use in a vaccine such as, but not limited to, against a pathogen.

[0509] Lipid nanoparticles may be engineered to alter the surface properties of particles so the lipid nanoparticles may penetrate the mucosal barrier. Mucus is located on mucosal tissue such as, but not limited to, oral (e.g., the buccal and esophageal membranes and tonsil tissue), ophthalmic, gastrointestinal (e.g., stomach, small intestine, large intestine, colon, rectum), nasal, respiratory (e.g., nasal, pharyngeal, tracheal and bronchial membranes), genital (e.g., vaginal, cervical and urethral membranes). Nanoparticles larger than 10-200 nm which are preferred for higher drug encapsulation efficiency and the ability to provide the sustained delivery of a wide array of drugs have been thought to be too large to rapidly diffuse through mucosal barriers. Mucus is continuously secreted, shed, discarded or digested and recycled so most of the trapped particles may be removed from the mucosla tissue within seconds or within a few hours. Large polymeric nanoparticles (200 nm-500 nm in diameter) which have been coated densely with a low molecular weight polyethylene glycol (PEG) diffused through mucus only 4 to 6-fold lower than the same particles diffusing in water (Lai et al. PNAS 2007 104(5):1482-487; Lai et al. Adv Drug Deliv Rev. 2009 61(2): 158-171; each of which is herein incorporated by reference in their entirety). The transport of nanoparticles may be determined using rates of permeation and/or fluorescent microscopy techniques including, but not limited to, fluorescence recovery after photobleaching (FRAP) and high resolution multiple particle tracking (MPT).

[0510] The lipid nanoparticle engineered to penetrate mucus may comprise a polymeric material (i.e. a polymeric core) and/or a polymer-vitamin conjugate and/or a tri-block co-polymer. The polymeric material may include, but is not limited to, polyamines, polyethers, polyamides, polyesters, polycarbamates, polyureas, polycarbonates, poly(styrenes), polyimides, polysulfones, polyurethanes, polyacetylenes, polyethylenes, polyethyeneimines, polyisocyanates, polyacrylates, polymethacrylates, polyacrylonitriles, and polyarylates. The polymeric material may be biodegradable and/or biocompatible. Non-limiting examples of specific polymers include poly(caprolactone) (PCL), ethylene vinyl acetate polymer (EVA), poly(lactic acid) (PLA), poly(L-lactic acid) (PLLA), poly(glycolic acid) (PGA), poly(lactic acid-co-glycolic acid) (PLGA), poly(L-lactic acid-co-glycolic acid) (PLLGA), poly(D,L-lactide) (PDLA), poly(L-lactide) (PLLA), poly(D,L-lactide-co-caprolactone), poly(D,L-lactide-co-caprolactone-co-glycolide), poly(D,L-lactide-co-PEO-co-D,L-lactide), poly(D,L-lactide-co-PPO-co-D,L-lactide), polyalkyl cyanoacralate, polyurethane, poly-L-lysine (PLL), hydroxypropyl methacrylate (HPMA), polyethyleneglycol, poly-L-glutamic acid, poly(hydroxy acids), polyanhydrides, polyorthoesters, poly(ester amides), polyamides, poly(ester ethers), polycarbonates, polyalkylenes such as polyethylene and polypropylene, polyalkylene glycols such as poly(ethylene glycol) (PEG), polyalkylene oxides (PEO), polyalkylene terephthalates such as poly(ethylene terephthalate), polyvinyl alcohols (PVA), polyvinyl ethers, polyvinyl esters such as poly(vinyl acetate), polyvinyl halides such as poly(vinyl chloride) (PVC), polyvinylpyrrolidone, polysiloxanes, polystyrene (PS), polyurethanes, derivatized celluloses such as alkyl celluloses, hydroxyalkyl celluloses, cellulose ethers, cellulose esters, nitro celluloses, hydroxypropylcellulose, carboxymethylcellulose, polymers of acrylic acids, such as poly(methyl(meth)acrylate) (PMMA), poly(ethyl(meth)acrylate), poly(butyl(meth)acrylate), poly(isobutyl(meth)acrylate), poly(hexyl(meth)acrylate), poly(isodecyl(meth)acrylate), poly(lauryl(meth)acrylate), poly(phenyl(meth)acrylate), poly(methyl acrylate), poly(isopropyl acrylate), poly(isobutyl acrylate), poly(octadecyl acrylate) and copolymers and mixtures thereof, polydioxanone and its copolymers, polyhydroxyalkanoates, polypropylene fumarate, polyoxymethylene, poloxamers, poly(ortho)esters, poly(butyric acid), poly(valeric acid), poly(lactide-co-caprolactone), and trimethylene carbonate, polyvinylpyrrolidone. The lipid nanoparticle may be coated or associated with a co-polymer such as, but not limited to, a block co-polymer, and (poly(ethylene glycol))-(poly(propylene oxide))-(poly(ethylene glycol)) triblock copolymer (see US Publication 20120121718 and US Publication 20100003337; each of which is herein incorporated by reference in their entirety). The co-polymer may be a polymer that is generally regarded as safe (GRAS) and the formation of the lipid nanoparticle may be in such a way that no new chemical entities are created. For example, the lipid nanoparticle may comprise poloxamers coating PLGA nanoparticles without forming new chemical entities which are still able to rapidly penetrate human mucus (Yang et al. Angew. Chem. Int. Ed. 2011 50:2597-2600; herein incorporated by reference in its entirety).

[0511] The vitamin of the polymer-vitamin conjugate may be vitamin E. The vitamin portion of the conjugate may be substituted with other suitable components such as, but not limited to, vitamin A, vitamin E, other vitamins, cholesterol, a hydrophobic moiety, or a hydrophobic component of other surfactants (e.g., sterol chains, fatty acids, hydrocarbon chains and alkylene oxide chains).

[0512] The lipid nanoparticle engineered to penetrate mucus may include surface altering agents such as, but not limited to, polynucleotides, modified nucleic acids, enhanced modified RNA, ribonucleic acids, anionic protein (e.g., bovine serum albumin), surfactants (e.g., cationic surfactants such as for example dimethyldioctadecyl-ammonium bromide), sugars or sugar derivatives (e.g., cyclodextrin), nucleic acids, polymers (e.g., heparin, polyethylene glycol and poloxamer), mucolytic agents (e.g., N-acetylcysteine, mugwort, bromelain, papain, clerodendrum, acetylcysteine, bromhexine, carbocisteine, eprazinone, mesna, ambroxol, sobrerol, domiodol, letosteine, stepronin, tiopronin, gelsolin, thymosin β4 dornase alfa, neltenexine, erdosteine) and various DNases including rhDNase. The surface altering agent may be embedded or enmeshed in the particle's surface or disposed (e.g., by coating, adsorption, covalent linkage, or other process) on the surface of the lipid nanoparticle. (see US Publication 20100215580 and US Publication 20080166414; each of which is herein incorporated by reference in their entirety).

[0513] The mucus penetrating lipid nanoparticles may comprise at least one polynucleotide, modified nucleic acids, enhanced modified RNA or ribonucleic acids described herein. The modified nucleic acids, enhanced modified RNA or ribonucleic acids may be encapsulated in the lipid nanoparticle and/or disposed on the surface of the particle. The polynucleotide, modified nucleic acids, enhanced modified RNA or ribonucleic acids may be covalently coupled to the lipid nanoparticle. Formulations of mucus penetrating lipid nanoparticles may comprise a plurality of nanoparticles. Further, the formulations may contain particles which may interact with the mucus and alter the structural and/or adhesive properties of the surrounding mucus to decrease mucoadhesion which may increase the delivery of the mucus penetrating lipid nanoparticles to the mucosal tissue.

[0514] In one embodiment, the polynucleotide, modified nucleic acids, enhanced modified RNA or ribonucleic acids is formulated as a lipoplex, such as, without limitation, the ATUPLEX™ system, the DACC system, the DBTC system and other siRNA-lipoplex technology from Silence Therapeutics (London, United Kingdom), STEMFECT™ from STEMGENT® (Cambridge, MA), and polyethylenimine (PEI) or protamine-based targeted and non-targeted delivery of nucleic acids acids (Aleku et al. Cancer Res. 2008 68:9788-9798; Strumberg et al. Int J Clin Pharmacol Ther 2012 50:76-78; Santel et al., Gene Ther 2006 13:1222-1234; Santel et al., Gene Ther 2006 13:1360-1370; Gutbier et al., Pulm Pharmacol. Ther. 2010 23:334-344; Kaufmann et al. Microvasc Res 2010 80:286-293 Weide et al. J Immunother. 2009 32:498-507; Weide et al. J Immunother. 2008 31:180-188; Pascolo Expert Opin. Biol. Ther. 4:1285-1294; Fotin-Mleczek et al., 2011 J. Immunother. 34:1-15; Song et al., Nature Biotechnol. 2005, 23:709-717; Peer et al., Proc Natl Acad Sci USA. 2007 6; 104:4095-4100; deFougerolles Hum Gene Ther. 2008 19:125-132; all of which are incorporated herein by reference in its entirety).

[0515] In one embodiment such formulations may also be constructed or compositions altered such that they passively or actively are directed to different cell types in vivo, including but not limited to hepatocytes, immune cells, tumor cells, endothelial cells, antigen presenting cells, and leukocytes (Akinc et al. Mol Ther. 2010 18:1357-1364; Song et al., Nat Biotechnol. 2005 23:709-717; Judge et al., J Clin Invest. 2009 119:661-673; Kaufmann et al., Microvasc Res 2010 80:286-293; Santel et al., Gene Ther 2006 13:1222-1234; Santel et al., Gene Ther 2006 13:1360-1370; Gutbier et al., Pulm Pharmacol. Ther. 2010 23:334-344; Basha et al., Mol. Ther. 2011 19:2186-2200; Fenske and Cullis, Expert Opin Drug Deliv. 2008 5:25-44; Peer et al., Science. 2008 319:627-630; Peer and Lieberman, Gene Ther. 2011 18:1127-1133; all of which are incorporated herein by reference in its entirety). One example of passive targeting of formulations to liver cells includes the DLin-DMA, DLin-KC2-DMA and MC3-based lipid nanoparticle formulations which have been shown to bind to apolipoprotein E and promote binding and uptake of these formulations into hepatocytes in vivo (Akinc et al. Mol Ther. 2010 18:1357-1364; herein incorporated by reference in its entirety). Formulations can also be selectively targeted through expression of different ligands on their surface as exemplified by, but not limited by, folate, transferrin, N-acetylgalactosamine (GalNAc), and antibody targeted approaches (Kolhatkar et al., Curr Drug Discov Technol. 2011 8:197-206; Musacchio and Torchilin, Front Biosci. 2011 16:1388-1412; Yu et al., Mol Membr Biol. 2010 27:286-298; Patil et al., Crit Rev Ther Drug Carrier Syst. 2008 25:1-61; Benoit et al., Biomacromolecules. 2011 12:2708-2714 Zhao et al., Expert Opin Drug Deliv. 2008 5:309-319; Akinc et al., Mol Ther. 2010 18:1357-1364; Srinivasan et al., Methods Mol Biol. 2012 820:105-116; Ben-Arie et al., Methods Mol Biol. 2012 757:497-507; Peer 2010 J Control Release. 20:63-68; Peer et al., Proc Natl Acad Sci USA. 2007 104:4095-4100; Kim et al., Methods Mol Biol. 2011 721:339-353; Subramanya et al., Mol Ther. 2010 18:2028-2037; Song et al., Nat Biotechnol. 2005 23:709-717; Peer et al., Science. 2008 319:627-630; Peer and Lieberman, Gene Ther. 2011 18:1127-1133; all of which are incorporated herein by reference in its entirety).

[0516] In one embodiment, the polynucleotide, modified nucleic acids, enhanced modified RNA or ribonucleic acids is formulated as a solid lipid nanoparticle. A solid lipid nanoparticle (SLN) may be spherical with an average diameter between 10 to 1000 nm. SLN possess a solid lipid core matrix that can solubilize lipophilic molecules and may be stabilized with surfactants and/or emulsifiers. In a further embodiment, the lipid nanoparticle may be a self-assembly lipid-polymer nanoparticle (see Zhang et al., ACS Nano, 2008, 2 (8), pp 1696-1702; herein incorporated by reference in its entirety).

[0517] Liposomes, lipoplexes, or lipid nanoparticles may be used to improve the efficacy of polynucleotides, modified nucleic acids, enhanced modified RNA or ribonucleic acids directed protein production as these formulations may be able to increase cell transfection by the polynucleotides, modified nucleic acids, enhanced modified RNA or ribonucleic acids; and/or increase the translation of encoded protein. One such example involves the use of lipid encapsulation to enable the effective systemic delivery of polyplex plasmid DNA (Heyes et al., Mol Ther. 2007 15:713-720; herein incorporated by reference in its entirety). The liposomes, lipoplexes, or lipid nanoparticles may also be used to increase the stability of the polynucleotides, modified nucleic acids, enhanced modified RNA or ribonucleic acids.

[0518] In one embodiment, the polynucleotide, modified nucleic acids, enhanced modified RNA or ribonucleic acids of the present invention can be formulated for controlled release and/or targeted delivery. As used herein, “controlled release” refers to a pharmaceutical composition or compound release profile that conforms to a particular pattern of release to effect a therapeutic outcome. In one embodiment, the polynucleotide, modified nucleic acids, enhanced modified RNA or ribonucleic acids may be encapsulated into a delivery agent described herein and/or known in the art for controlled release and/or targeted delivery. As used herein, the term “encapsulate” means to enclose, surround or encase. As it relates to the formulation of the compounds of the invention, encapsulation may be substantial, complete or partial. The term “substantially encapsulated” means that at least greater than 50, 60, 70, 80, 85, 90, 95, 96, 97, 98, 99, 99.9, 99.9 or greater than 99.999% of the pharmaceutical composition or compound of the invention may be enclosed, surrounded or encased within the delivery agent. “Partially encapsulation” means that less than 10, 10, 20, 30, 40 50 or less of the pharmaceutical composition or compound of the invention may be enclosed, surrounded or encased within the delivery agent. Advantageously, encapsulation may be determined by measuring the escape or the activity of the pharmaceutical composition or compound of the invention using fluorescence and/or electron micrograph. For example, at least 1, 5, 10, 20, 30, 40, 50, 60, 70, 80, 85, 90, 95, 96, 97, 98, 99, 99.9, 99.99 or greater than 99.99% of the pharmaceutical composition or compound of the invention are encapsulated in the delivery agent.

[0519] In another embodiment, the polynucleotides, modified nucleic acids, enhanced modified RNA or ribonucleic acids may be encapsulated into a lipid nanoparticle or a rapidly eliminating lipid nanoparticle and the lipid nanoparticles or a rapidly eliminating lipid nanoparticle may then be encapsulated into a polymer, hydrogel and/or surgical sealant described herein and/or known in the art. As a non-limiting example, the polymer, hydrogel or surgical sealant may be PLGA, ethylene vinyl acetate (EVAc), poloxamer, GELSITE® (Nanotherapeutics, Inc. Alachua, FL), HYLENEX® (Halozyme Therapeutics, San Diego CA), surgical sealants such as fibrinogen polymers (Ethicon Inc. Cornelia, GA), TISSELL® (Baxter International, Inc Deerfield, IL), PEG-based sealants, and COSEAL® (Baxter International, Inc Deerfield, IL).

[0520] In one embodiment, the lipid nanoparticle may be encapsulated into any polymer or hydrogel known in the art which may form a gel when injected into a subject. As another non-limiting example, the lipid nanoparticle may be encapsulated into a polymer matrix which may be biodegradable.

[0521] In one embodiment, the polynucleotides, modified nucleic acids, enhanced modified RNA or ribonucleic acids formulation for controlled release and/or targeted delivery may also include at least one controlled release coating. Controlled release coatings include, but are not limited to, OPADRY®, polyvinylpyrrolidone/vinyl acetate copolymer, polyvinylpyrrolidone, hydroxypropyl methylcellulose, hydroxypropyl cellulose, hydroxyethyl cellulose, EUDRAGIT RL®, EUDRAGIT RS® and cellulose derivatives such as ethylcellulose aqueous dispersions (AQUACOAT® and SURELEASE®).

[0522] In one embodiment, the controlled release and/or targeted delivery formulation may comprise at least one degradable polyester which may contain polycationic side chains. Degradeable polyesters include, but are not limited to, poly(serine ester), poly(L-lactide-co-L-lysine), poly(4-hydroxy-L-proline ester), and combinations thereof. In another embodiment, the degradable polyesters may include a PEG conjugation to form a PEGylated polymer.

[0523] In one embodiment, the modified nucleic acids, enhanced modified RNA or ribonucleic acids of the present invention may be encapsulated in a therapeutic nanoparticle. Therapeutic nanoparticles may be formulated by methods described herein and known in the art such as, but not limited to, International Pub Nos. WO2010005740, WO2010030763, WO2010005721, WO2010005723, WO2012054923, US Pub. Nos. US20110262491, US20100104645, US20100087337, US20100068285, US20110274759, US20100068286, and U.S. Pat. No. 8,206,747; each of which is herein incorporated by reference in their entirety. In another embodiment, therapeutic polymer nanoparticles may be identified by the methods described in US Pub No. US20120140790, herein incorporated by reference in its entirety.

[0524] In one embodiment, the therapeutic nanoparticle may be formulated for sustained release. As used herein, “sustained release” refers to a pharmaceutical composition or compound that conforms to a release rate over a specific period of time. The period of time may include, but is not limited to, hours, days, weeks, months and years. As a non-limiting example, the sustained release nanoparticle may comprise a polymer and a therapeutic agent such as, but not limited to, the polynucleotides, modified nucleic acids, enhanced modified RNA or ribonucleic acids of the present invention (see International Pub No. 2010075072 and US Pub No. US20100216804 and US20110217377, each of which is herein incorporated by reference in their entirety).

[0525] In one embodiment, the therapeutic nanoparticles may be formulated to be target specific. As a non-limiting example, the therapeutic nanoparticles may include a corticosteroid (see International Pub. No. WO2011084518). In one embodiment, the therapeutic nanoparticles may be formulated to be cancer specific. As a non-limiting example, the therapeutic nanoparticles may be formulated in nanoparticles described in International Pub No. WO2008121949, WO2010005726, WO2010005725, WO2011084521 and US Pub No. US20100069426, US20120004293 and US20100104655, each of which is herein incorporated by reference in their entirety.

[0526] In one embodiment, the nanoparticles of the present invention may comprise a polymeric matrix. As a non-limiting example, the nanoparticle may comprise two or more polymers such as, but not limited to, polyethylenes, polycarbonates, polyanhydrides, polyhydroxyacids, polypropylfumerates, polycaprolactones, polyamides, polyacetals, polyethers, polyesters, poly(orthoesters), polycyanoacrylates, polyvinyl alcohols, polyurethanes, polyphosphazenes, polyacrylates, polymethacrylates, polycyanoacrylates, polyureas, polystyrenes, polyamines, polylysine, poly(ethylene imine), poly(serine ester), poly(L-lactide-co-L-lysine), poly(4-hydroxy-L-proline ester) or combinations thereof.

[0527] In one embodiment, the diblock copolymer may include PEG in combination with a polymer such as, but not limited to, polyethylenes, polycarbonates, polyanhydrides, polyhydroxyacids, polypropylfumerates, polycaprolactones, polyamides, polyacetals, polyethers, polyesters, poly(orthoesters), polycyanoacrylates, polyvinyl alcohols, polyurethanes, polyphosphazenes, polyacrylates, polymethacrylates, polycyanoacrylates, polyureas, polystyrenes, polyamines, polylysine, poly(ethylene imine), poly(serine ester), poly(L-lactide-co-L-lysine), poly(4-hydroxy-L-proline ester) or combinations thereof.

[0528] In one embodiment, the therapeutic nanoparticle comprises a diblock copolymer. As a non-limiting example the therapeutic nanoparticle comprises a PLGA-PEG block copolymer (see US Pub. No. US20120004293 and U.S. Pat. No. 8,236,330, each of which is herein incorporated by reference in their entirety). In another non-limiting example, the therapeutic nanoparticle is a stealth nanoparticle comprising a diblock copolymer of PEG and PLA or PEG and PLGA (see U.S. Pat. No. 8,246,968, herein incorporated by reference in its entirety).

[0529] In one embodiment, the therapeutic nanoparticle may comprise at least one acrylic polymer. Acrylic polymers include but are not limited to, acrylic acid, methacrylic acid, acrylic acid and methacrylic acid copolymers, methyl methacrylate copolymers, ethoxyethyl methacrylates, cyanoethyl methacrylate, amino alkyl methacrylate copolymer, poly(acrylic acid), poly(methacrylic acid), polycyanoacrylates and combinations thereof.

[0530] In one embodiment, the therapeutic nanoparticles may comprise at least one cationic polymer described herein and/or known in the art.

[0531] In one embodiment, the therapeutic nanoparticles may comprise at least one amine-containing polymer such as, but not limited to polylysine, polyethylene imine, poly(amidoamine) dendrimers and combinations thereof.

[0532] In one embodiment, the therapeutic nanoparticles may comprise at least one degradable polyester which may contain polycationic side chains. Degradeable polyesters include, but are not limited to, poly(serine ester), poly(L-lactide-co-L-lysine), poly(4-hydroxy-L-proline ester), and combinations thereof. In another embodiment, the degradable polyesters may include a PEG conjugation to form a PEGylated polymer.

[0533] In another embodiment, the therapeutic nanoparticle may include a conjugation of at least one targeting ligand.

[0534] In one embodiment, the therapeutic nanoparticle may be formulated in an aqueous solution which may be used to target cancer (see International Pub No. WO2011084513 and US Pub No. US20110294717, each of which is herein incorporated by reference in their entirety).

[0535] In one embodiment, the polynucleotides, modified nucleic acids, enhanced modified RNA or ribonucleic acids may be encapsulated in, linked to and/or associated with synthetic nanocarriers. The synthetic nanocarriers may be formulated using methods known in the art and/or described herein. As a non-limiting example, the synthetic nanocarriers may be formulated by the methods described in International Pub Nos. WO2010005740, WO2010030763 and US Pub. Nos. US20110262491, US20100104645 and US20100087337, each of which is herein incorporated by reference in their entirety. In another embodiment, the synthetic nanocarrier formulations may be lyophilized by methods described in International Pub. No. WO2011072218 and U.S. Pat. No. 8,211,473; each of which is herein incorporated by reference in their entirety.

[0536] In one embodiment, the synthetic nanocarriers may contain reactive groups to release the modified nucleic acids, enhanced modified RNA or ribonucleic acids described herein (see International Pub. No. WO20120952552 and US Pub No. US20120171229, each of which is herein incorporated by reference in their entirety).

[0537] In one embodiment, the synthetic nanocarriers may contain an immunostimulatory agent to enhance the immune response from delivery of the synthetic nanocarrier. As a non-limiting example, the synthetic nanocarrier may comprise a Th1 immunostimulatory agent which may enhance a Th1-based response of the immune system (see International Pub No. WO2010123569 and US Pub. No. US20110223201, each of which is herein incorporated by reference in its entirety).

[0538] In one embodiment, the synthetic nanocarriers may be formulated for targeted release. In one embodiment, the synthetic nanocarrier is formulated to release the polynucleotides, modified nucleic acids, enhanced modified RNA or ribonucleic acids at a specified pH and/or after a desired time interval. As a non-limiting example, the synthetic nanoparticle may be formulated to release the modified nucleic acids, enhanced modified RNA or ribonucleic acids after 24 hours and/or at a pH of 4.5 (see International Pub. Nos. WO2010138193 and WO2010138194 and US Pub Nos. US20110020388 and US20110027217, each of which is herein incorporated by reference in their entirety).

[0539] In one embodiment, the synthetic nanocarriers may be formulated for controlled and/or sustained release of the polynucleotides, modified nucleic acids, enhanced modified RNA or ribonucleic acids described herein. As a non-limiting example, the synthetic nanocarriers for sustained release may be formulated by methods known in the art, described herein and/or as described in International Pub No. WO2010138192 and US Pub No. 20100303850, each of which is herein incorporated by reference in their entirety.

[0540] In one embodiment, the synthetic nanocarrier may be formulated for use as a vaccine. In one embodiment, the synthetic nanocarrier may encapsulate at least one modified nucleic acids, enhanced modified RNA or ribonucleic acids which encodes at least one antigen. As a non-limiting example, the synthetic nanocarrier may include at least one antigen and an excipient for a vaccine dosage form (see International Pub No. WO2011150264 and US Pub No. US20110293723, each of which is herein incorporated by reference in their entirety). As another non-limiting example, a vaccine dosage form may include at least two synthetic nanocarriers with the same or different antigens and an excipient (see International Pub No. WO2011150249 and US Pub No. US20110293701, each of which is herein incorporated by reference in their entirety). The vaccine dosage form may be selected by methods described herein, known in the art and/or described in International Pub No. WO2011150258 and US Pub No. US20120027806, each of which is herein incorporated by reference in their entirety).

[0541] In one embodiment, the synthetic nanocarrier may comprise at least one polynucleotide, modified nucleic acids, enhanced modified RNA or ribonucleic acids which encodes at least one adjuvant. In another embodiment, the synthetic nanocarrier may comprise at least one modified nucleic acids, enhanced modified RNA or ribonucleic acids and an adjuvant. As a non-limiting example, the synthetic nanocarrier comprising and adjuvant may be formulated by the methods described in International Pub No. WO2011150240 and US Pub No. US20110293700, each of which is herein incorporated by reference in its entirety.

[0542] In one embodiment, the synthetic nanocarrier may encapsulate at least one polynucleotide, modified nucleic acids, enhanced modified RNA or ribonucleic acids which encodes a peptide, fragment or region from a virus. As a non-limiting example, the synthetic nanocarrier may include, but is not limited to, the nanocarriers described in International Pub No. WO2012024621, WO201202629, WO2012024632 and US Pub No. US20120064110, US20120058153 and US20120058154, each of which is herein incorporated by reference in their entirety.

### Polymers, Biodegradable Nanoparticles, and Core-Shell Nanoparticles

[0543] The polynucleotides, modified nucleic acids, enhanced modified RNA or ribonucleic acids of the invention can be formulated using natural and/or synthetic polymers. Non-limiting examples of polymers which may be used for delivery include, but are not limited to, Dynamic POLYCONJUGATE™ formulations from MIRUS® Bio (Madison, WI) and Roche Madison (Madison, WI), PHASERX™ polymer formulations such as, without limitation, SMARTT POLYMER TECHNOLOGY™ (Seattle, WA), DMRI/DOPE, poloxamer, VAXFECTIN® adjuvant from Vical (San Diego, CA), chitosan, cyclodextrin from Calando Pharmaceuticals (Pasadena, CA), dendrimers and poly(lactic-co-glycolic acid) (PLGA) polymers, RONDEL™ (RNAi/Oligonucleotide Nanoparticle Delivery) polymers (Arrowhead Research Corporation, Pasadena, CA) and pH responsive co-block polymers such as, but not limited to, PHASERX™ (Seattle, WA).

[0544] A non-limiting example of PLGA formulations include, but are not limited to, PLGA injectable depots (e.g., ELIGARD® which is formed by dissolving PLGA in 66% N-methyl-2-pyrrolidone (NMP) and the remainder being aqueous solvent and leuprolide. Once injected, the PLGA and leuprolide peptide precipitates into the subcutaneous space).

[0545] Many of these polymer approaches have demonstrated efficacy in delivering oligonucleotides in vivo into the cell cytoplasm (reviewed in deFougerolles Hum Gene Ther. 2008 19:125-132; herein incorporated by reference in its entirety). Two polymer approaches that have yielded robust in vivo delivery of nucleic acids, in this case with small interfering RNA (siRNA), are dynamic polyconjugates and cyclodextrin-based nanoparticles. The first of these delivery approaches uses dynamic polyconjugates and has been shown in vivo in mice to effectively deliver siRNA and silence endogenous target mRNA in hepatocytes (Rozema et al., Proc Natl Acad Sci USA. 2007 104:12982-12887). This particular approach is a multicomponent polymer system whose key features include a membrane-active polymer to which nucleic acid, in this case siRNA, is covalently coupled via a disulfide bond and where both PEG (for charge masking) and N-acetylgalactosamine (for hepatocyte targeting) groups are linked via pH-sensitive bonds (Rozema et al., Proc Natl Acad Sci USA. 2007 104:12982-12887). On binding to the hepatocyte and entry into the endosome, the polymer complex disassembles in the low-pH environment, with the polymer exposing its positive charge, leading to endosomal escape and cytoplasmic release of the siRNA from the polymer. Through replacement of the N-acetylgalactosamine group with a mannose group, it was shown one could alter targeting from asialoglycoprotein receptor-expressing hepatocytes to sinusoidal endothelium and Kupffer cells. Another polymer approach involves using transferrin-targeted cyclodextrin-containing polycation nanoparticles. These nanoparticles have demonstrated targeted silencing of the EWS-FLII gene product in transferrin receptor-expressing Ewing's sarcoma tumor cells (Hu-Lieskovan et al., Cancer Res.2005 65: 8984-8982) and siRNA formulated in these nanoparticles was well tolerated in non-human primates (Heidel et al., Proc Natl Acad Sci USA 2007 104:5715-21). Both of these delivery strategies incorporate rational approaches using both targeted delivery and endosomal escape mechanisms.

[0546] The polymer formulation can permit the sustained or delayed release of polynucleotides, modified nucleic acids, enhanced modified RNA or ribonucleic acids (e.g., following intramuscular or subcutaneous injection). The altered release profile for the polynucleotides, modified nucleic acids, enhanced modified RNA or ribonucleic acids can result in, for example, translation of an encoded protein over an extended period of time. The polymer formulation may also be used to increase the stability of the polynucleotide, modified nucleic acids, enhanced modified RNA or ribonucleic acids. Biodegradable polymers have been previously used to protect nucleic acids other than modified nucleic acids, enhanced modified RNA or ribonucleic acids from degradation and been shown to result in sustained release of payloads in vivo (Rozema et al., Proc Natl Acad Sci USA. 2007 104:12982-12887; Sullivan et al., Expert Opin Drug Deliv. 2010 7:1433-1446; Convertine et al., Biomacromolecules. 2010 Oct. 1; Chu et al., Ace Chem Res. 2012 Jan. 13; Manganiello et al., Biomaterials. 2012 33:2301-2309; Benoit et al., Biomacromolecules. 2011 12:2708-2714; Singha et al., Nucleic Acid Ther. 2011 2:133-147; deFougerolles Hum Gene Ther. 2008 19:125-132; Schaffert and Wagner, Gene Ther. 2008 16:1131-1138; Chaturvedi et al., Expert Opin Drug Deliv. 2011 8:1455-1468; Davis, Mol Pharm. 2009 6:659-668; Davis, Nature 2010 464:1067-1070; herein incorporated by reference in its entirety).

[0547] In one embodiment, the pharmaceutical compositions may be sustained release formulations. In a further embodiment, the sustained release formulations may be for subcutaneous delivery. Sustained release formulations may include, but are not limited to, PLGA microspheres, ethylene vinyl acetate (EVAc), poloxamer, GELSITE® (Nanotherapeutics, Inc. Alachua, FL), HYLENEX® (Halozyme Therapeutics, San Diego CA), surgical sealants such as fibrinogen polymers (Ethicon Inc. Cornelia, GA), TISSELL® (Baxter International, Inc Deerfield, IL), PEG-based sealants, and COSEAL® (Baxter International, Inc Deerfield, IL).

[0548] As a non-limiting example modified mRNA may be formulated in PLGA microspheres by preparing the PLGA microspheres with tunable release rates (e.g., days and weeks) and encapsulating the modified mRNA in the PLGA microspheres while maintaining the integrity of the modified mRNA during the encapsulation process. EVAc are non-biodegradeable, biocompatible polymers which are used extensively in pre-clinical sustained release implant applications (e.g., extended release products Ocusert a pilocarpine ophthalmic insert for glaucoma or progestasert a sustained release progesterone intrauterine deivce; transdermal delivery systems Testoderm, Duragesic and Selegiline; catheters). Poloxamer F-407 NF is a hydrophilic, non-ionic surfactant triblock copolymer of polyoxyethylene-polyoxypropylene-polyoxyethylene having a low viscosity at temperatures less than 5° C. and forms a solid gel at temperatures greater than 15° C. PEG-based surgical sealants comprise two synthetic PEG components mixed in a delivery device which can be prepared in one minute, seals in 3 minutes and is reabsorbed within 30 days. GELSITE® and natural polymers are capable of in-situ gelation at the site of administration. They have been shown to interact with protein and peptide therapeutic candidates through ionic ineraction to provide a stabilizing effect.

[0549] Polymer formulations can also be selectively targeted through expression of different ligands as exemplified by, but not limited by, folate, transferrin, and N-acetylgalactosamine (GalNAc) (Benoit et al., Biomacromolecules. 2011 12:2708-2714; Rozema et al., Proc Natl Acad Sci USA. 2007 104:12982-12887; Davis, Mol Pharm. 2009 6:659-668; Davis, Nature 2010 464:1067-1070; each of which is herein incorporated by reference in its entirety).

[0550] The polynucleotides, modified nucleic acids, enhanced modified RNA or ribonucleic acids of the invention may be formulated with or in a polymeric compound. The polymer may include at least one polymer such as, but not limited to, polyethenes, polyethylene glycol (PEG), poly(l-lysine)(PLL), PEG grafted to PLL, cationic lipopolymer, biodegradable cationic lipopolymer, polyethyleneimine (PEI), cross-linked branched poly(alkylene imines), a polyamine derivative, a modified poloxamer, a biodegradable polymer, biodegradable block copolymer, biodegradable random copolymer, biodegradable polyester copolymer, biodegradable polyester block copolymer, biodegradable polyester block random copolymer, linear biodegradable copolymer, poly[α-(4-aminobutyl)-L-glycolic acid) (PAGA), biodegradable cross-linked cationic multi-block copolymers, polycarbonates, polyanhydrides, polyhydroxyacids, polypropylfumerates, polycaprolactones, polyamides, polyacetals, polyethers, polyesters, poly(orthoesters), polycyanoacrylates, polyvinyl alcohols, polyurethanes, polyphosphazenes, polyacrylates, polymethacrylates, polycyanoacrylates, polyureas, polystyrenes, polyamines, polylysine, poly(ethylene imine), poly(serine ester), poly(L-lactide-co-L-lysine), poly(4-hydroxy-L-proline ester), acrylic polymers, amine-containing polymers or combinations thereof.

[0551] As a non-limiting example, the polynucleotides, modified nucleic acids, enhanced modified RNA or ribonucleic acids of the invention may be formulated with the polymeric compound of PEG grafted with PLL as described in U.S. Pat. No. 6,177,274 herein incorporated by reference in its entirety. The formulation may be used for transfecting cells in vitro or for in vivo delivery of the modified nucleic acids, enhanced modified RNA or ribonucleic acids. In another example, the polynucleotides, modified nucleic acids, enhanced modified RNA or ribonucleic acids may be suspended in a solution or medium with a cationic polymer, in a dry pharmaceutical composition or in a solution that is capable of being dried as described in U.S. Pub. Nos. 20090042829 and 20090042825 each of which are herein incorporated by reference in their entireties.

[0552] As another non-limiting example the polynucleotides, modified nucleic acids, enhanced modified RNA or ribonucleic acids of the invention may be formulated with a PLGA-PEG block copolymer (see US Pub. No. US20120004293 and U.S. Pat. No. 8,236,330, each of which are herein incorporated by reference in their entireties). As a non-limiting example, the polynucleotides, modified nucleic acids, enhanced modified RNA or ribonucleic acids of the invention may be formulated with a diblock copolymer of PEG and PLA or PEG and PLGA (see U.S. Pat. No. 8,246,968, herein incorporated by reference in its entirety).

[0553] A polyamine derivative may be used to deliver nucleic acids or to treat and/or prevent a disease or to be included in an implantable or injectable device (U.S. Pub. No. 20100260817 herein incorporated by reference in its entirety). As a non-limiting example, a pharmaceutical composition may include the modified nucleic acids, enhanced modified RNA or ribonucleic acids and the polyamine derivative described in U.S. Pub. No. 20100260817 (the contents of which are incorporated herein by reference in its entirety).

[0554] The polynucleotides, modified nucleic acids, enhanced modified RNA or ribonucleic acids of the invention may be formulated with at least one acrylic polymer. Acrylic polymers include but are not limited to, acrylic acid, methacrylic acid, acrylic acid and methacrylic acid copolymers, methyl methacrylate copolymers, ethoxyethyl methacrylates, cyanoethyl methacrylate, amino alkyl methacrylate copolymer, poly(acrylic acid), poly(methacrylic acid), polycyanoacrylates and combinations thereof.

[0555] In one embodiment, the polynucleotides, modified nucleic acids, enhanced modified RNA or ribonucleic acids of the present invention may be formulated with at least one polymer described in International Publication Nos. WO2011115862, WO2012082574 and WO2012068187, each of which are herein incorporated by reference in their entireties. In another embodiment, the polynucleotides, modified nucleic acids, enhanced modified RNA or ribonucleic acids of the present invention may be formulated with a polymer of formula Z as described in WO2011115862, herein incorporated by reference in its entirety. In yet another embodiment, the polynucleotides, modified nucleic acids, enhanced modified RNA or ribonucleic acids may be formulated with a polymer of formula Z, Z′ or Z″ as described in WO2012082574 or WO2012068187, each of which are herein incorporated by reference in their entireties. The polymers formulated with the modified RNA of the present invention may be synthesized by the methods described in WO2012082574 or WO2012068187, each of which are herein incorporated by reference in their entireties.

[0556] Formulations of polynucleotides, modified nucleic acids, enhanced modified RNA or ribonucleic acids of the invention may include at least one amine-containing polymer such as, but not limited to polylysine, polyethylene imine, poly(amidoamine) dendrimers or combinations thereof.

[0557] For example, the polynucleotides, modified nucleic acids, enhanced modified RNA or ribonucleic acids of the invention may be formulated in a pharmaceutical compound including a poly(alkylene imine), a biodegradable cationic lipopolymer, a biodegradable block copolymer, a biodegradable polymer, or a biodegradable random copolymer, a biodegradable polyester block copolymer, a biodegradable polyester polymer, a biodegradable polyester random copolymer, a linear biodegradable copolymer, PAGA, a biodegradable cross-linked cationic multi-block copolymer or combinations thereof. The biodegradable cationic lipopolymer may be made by methods known in the art and/or described in U.S. Pat. No. 6,696,038, U.S. App. Nos. 20030073619 and 20040142474 each of which is herein incorporated by reference in their entireties. The poly(alkylene imine) may be made using methods known in the art and/or as described in U.S. Pub. No. 20100004315, herein incorporated by reference in its entirety. The biodegradabale polymer, biodegradable block copolymer, the biodegradable random copolymer, biodegradable polyester block copolymer, biodegradable polyester polymer, or biodegradable polyester random copolymer may be made using methods known in the art and/or as described in U.S. Pat. Nos. 6,517,869 and 6,267,987, the contents of which are each incorporated herein by reference in its entirety. The linear biodegradable copolymer may be made using methods known in the art and/or as described in U.S. Pat. No. 6,652,886. The PAGA polymer may be made using methods known in the art and/or as described in U.S. Pat. No. 6,217,912 herein incorporated by reference in its entirety. The PAGA polymer may be copolymerized to form a copolymer or block copolymer with polymers such as but not limited to, poly-L-lysine, polyargine, polyornithine, histones, avidin, protamines, polylactides and poly(lactide-co-glycolides). The biodegradable cross-linked cationic multi-block copolymers may be made my methods known in the art and/or as described in U.S. Pat. No. 8,057,821 or U.S. Pub. No. 2012009145 each of which are herein incorporated by reference in their entireties. For example, the multi-block copolymers may be synthesized using linear polyethyleneimine (LPEI) blocks which have distinct patterns as compared to branched polyethyleneimines. Further, the composition or pharmaceutical composition may be made by the methods known in the art, described herein, or as described in U.S. Pub. No. 20100004315 or U.S. Pat. Nos. 6,267,987 and 6,217,912 each of which are herein incorporated by reference in their entireties.

[0558] The polynucleotides, modified nucleic acids, enhanced modified RNA or ribonucleic acids of the invention may be formulated with at least one degradable polyester which may contain polycationic side chains. Degradeable polyesters include, but are not limited to, poly(serine ester), poly(L-lactide-co-L-lysine), poly(4-hydroxy-L-proline ester), and combinations thereof. In another embodiment, the degradable polyesters may include a PEG conjugation to form a PEGylated polymer.

[0559] In one embodiment, the polymers described herein may be conjugated to a lipid-terminating PEG. As a non-limiting example, PLGA may be conjugated to a lipid-terminating PEG forming PLGA-DSPE-PEG. As another non-limiting example, PEG conjugates for use with the present invention are described in International Publication No. WO2008103276, herein incorporated by reference in its entirety.

[0560] In one embodiment, the polynucleotides, modified RNA described herein may be conjugated with another compound. Non-limiting examples of conjugates are described in U.S. Pat. Nos. 7,964,578 and 7,833,992, each of which are herein incorporated by reference in their entireties. In another embodiment, modified RNA of the present invention may be conjugated with conjugates of formula 1-122 as described in U.S. Pat. Nos. 7,964,578 and 7,833,992, each of which are herein incorporated by reference in their entireties.

[0561] As described in U.S. Pub. No. 20100004313, herein incorporated by reference in its entirety, a gene delivery composition may include a nucleotide sequence and a poloxamer. For example, the polynucleotide, modified nucleic acids, enhanced modified RNA or ribonucleic acids of the present inveition may be used in a gene delivery composition with the poloxamer described in U.S. Pub. No. 20100004313.

[0562] In one embodiment, the polymer formulation of the present invention may be stabilized by contacting the polymer formulation, which may include a cationic carrier, with a cationic lipopolymer which may be covalently linked to cholesterol and polyethylene glycol groups. The polymer formulation may be contacted with a cationic lipopolymer using the methods described in U.S. Pub. No. 20090042829 herein incorporated by reference in its entirety. The cationic carrier may include, but is not limited to, polyethylenimine, poly(trimethylenimine), poly(tetramethylenimine), polypropylenimine, aminoglycoside-polyamine, dideoxy-diamino-b-cyclodextrin, spermine, spermidine, poly(2-dimethylamino)ethyl methacrylate, poly(lysine), poly(histidine), poly(arginine), cationized gelatin, dendrimers, chitosan, 1,2-Dioleoyl-3-Trimethylammonium-Propane (DOTAP), N-[1-(2,3-dioleoyloxy)propyl]-N,N,N-trimethylammonium chloride (DOTMA), 1-[2-(oleoyloxy)ethyl]-2-oleyl-3-(2-hydroxyethyl)imidazolinium chloride (DOTIM), 2,3-dioleyloxy-N-[2(sperminecarboxamido)ethyl]-N,N-dimethyl-1-propanaminium trifluoroacetate (DOSPA), 3B-[N—(N′,N′-Dimethylaminoethane)-carbamoyl]Cholesterol Hydrochloride (DC-Cholesterol HCl) diheptadecylamidoglycyl spermidine (DOGS), N,N-distearyl-N,N-dimethylammonium bromide (DDAB), N-(1,2-dimyristyloxyprop-3-yl)-N,N-dimethyl-N-hydroxyethyl ammonium bromide (DMRIE), N,N-dioleyl-N,N-dimethylammonium chloride DODAC) and combinations thereof.

[0563] The polynucleotides, modified nucleic acids, enhanced modified RNA or ribonucleic acids of the invention can also be formulated as a nanoparticle using a combination of polymers, lipids, and/or other biodegradable agents, such as, but not limited to, calcium phosphate. Components may be combined in a core-shell, hybrid, and/or layer-by-layer architecture, to allow for fine-tuning of the nanoparticle so to deliver the modified nucleic acids, enhanced modified RNA or ribonucleic acids may be enhanced (Wang et al., Nat Mater. 2006 5:791-796; Fuller et al., Biomaterials. 2008 29:1526-1532; DeKoker et al., Adv Drug Deliv Rev. 2011 63:748-761; Endres et al., Biomaterials. 2011 32:7721-7731; Su et al., Mol Pharm. 2011 Jun. 6; 8(3):774-87; herein incorporated by reference in its entirety).

[0564] Biodegradable calcium phosphate nanoparticles in combination with lipids and/or polymers have been shown to deliver polynucleotides, modified nucleic acids, enhanced modified RNA or ribonucleic acids in vivo. In one embodiment, a lipid coated calcium phosphate nanoparticle, which may also contain a targeting ligand such as anisamide, may be used to deliver the polynucleotides, modified nucleic acids, enhanced modified RNA or ribonucleic acids of the present invention. For example, to effectively deliver siRNA in a mouse metastatic lung model a lipid coated calcium phosphate nanoparticle was used (Li et al., J Contr Rel. 2010 142: 416-421; Li et al., J Contr Rel. 2012 158:108-114; Yang et al., Mol Ther. 2012 20:609-615). This delivery system combines both a targeted nanoparticle and a component to enhance the endosomal escape, calcium phosphate, in order to improve delivery of the siRNA.

[0565] In one embodiment, calcium phosphate with a PEG-polyanion block copolymer may be used to deliver polynucleotides, modified nucleic acids, enhanced modified RNA or ribonucleic acids (Kazikawa et al., J Contr Rel. 2004 97:345-356; Kazikawa et al., J Contr Rel. 2006 111:368-370).

[0566] In one embodiment, a PEG-charge-conversional polymer (Pitella et al., Biomaterials. 2011 32:3106-3114) may be used to form a nanoparticle to deliver the polynucleotides, modified nucleic acids, enhanced modified RNA or ribonucleic acids of the present invention. The PEG-charge-conversional polymer may improve upon the PEG-polyanion block copolymers by being cleaved into a polycation at acidic pH, thus enhancing endosomal escape.

[0567] The use of core-shell nanoparticles has additionally focused on a high-throughput approach to synthesize cationic cross-linked nanogel cores and various shells (Siegwart et al., Proc Natl Acad Sci USA. 2011 108:12996-13001). The complexation, delivery, and internalization of the polymeric nanoparticles can be precisely controlled by altering the chemical composition in both the core and shell components of the nanoparticle. For example, the core-shell nanoparticles may efficiently deliver siRNA to mouse hepatocytes after they covalently attach cholesterol to the nanoparticle.

[0568] In one embodiment, a hollow lipid core comprising a middle PLGA layer and an outer neutral lipid layer containg PEG may be used to delivery of the polynucleotide, modified nucleic acids, enhanced modified RNA or ribonucleic acids of the present invention. As a non-limiting example, in mice bearing a luciferease-expressing tumor, it was determined that the lipid-polymer-lipid hybrid nanoparticle significantly suppressed luciferase expression, as compared to a conventional lipoplex (Shi et al, Angew Chem Int Ed. 2011 50:7027-7031).

### Peptides and Proteins

[0569] The polynucleotides, modified nucleic acids, enhanced modified RNA or ribonucleic acids of the invention can be formulated with peptides and/or proteins in order to increase transfection of cells by the modified nucleic acids, enhanced modified RNA or ribonucleic acids. In one embodiment, peptides such as, but not limited to, cell penetrating peptides and proteins and peptides that enable intracellular delivery may be used to deliver pharmaceutical formulations. A non-limiting example of a cell penetrating peptide which may be used with the pharmaceutical formulations of the present invention includes a cell-penetrating peptide sequence attached to polycations that facilitates delivery to the intracellular space, e.g., HIV-derived TAT peptide, penetratins, transportans, or hCT derived cell-penetrating peptides (see, e.g., Caron et al., Mol. Ther. 3(3):310-8 (2001); Langel, Cell-Penetrating Peptides: Processes and Applications (CRC Press, Boca Raton FL, 2002); El-Andaloussi et al., Curr. Pharm. Des. 11(28):3597-611 (2003); and Deshayes et al., Cell. Mol. Life Sci. 62(16):1839-49 (2005), all of which are incorporated herein by reference). The compositions can also be formulated to include a cell penetrating agent, e.g., liposomes, which enhance delivery of the compositions to the intracellular space. Modified nucleic acids, enhanced modified RNA or ribonucleic acids of the invention may be complexed to peptides and/or proteins such as, but not limited to, peptides and/or proteins from Aileron Therapeutics (Cambridge, MA) and Permeon Biologics (Cambridge, MA) in order to enable intracellular delivery (Cronican et al., ACS Chem. Biol. 2010 5:747-752; McNaughton et al., Proc. Natl. Acad. Sci. USA 2009 106:6111-6116; Sawyer, Chem Biol Drug Des. 2009 73:3-6; Verdine and Hilinski, Methods Enzymol. 2012; 503:3-33; all of which are herein incorporated by reference in its entirety).

[0570] In one embodiment, the cell-penetrating polypeptide may comprise a first domain and a second domain. The first domain may comprise a supercharged polypeptide. The second domain may comprise a protein-binding partner. As used herein, “protein-binding partner” includes, but are not limited to, antibodies and functional fragments thereof, scaffold proteins, or peptides. The cell-penetrating polypeptide may further comprise an intracellular binding partner for the protein-binding partner. The cell-penetrating polypeptide may be capable of being secreted from a cell where the modified nucleic acids, enhanced modified RNA or ribonucleic acids may be introduced.

[0571] Formulations of the including peptides or proteins may be used to increase cell transfection by the polynucleotides, modified nucleic acids, enhanced modified RNA or ribonucleic acids, alter the biodistribution of the polynucleotides, modified nucleic acids, enhanced modified RNA or ribonucleic acids (e.g., by targeting specific tissues or cell types), and/or increase the translation of encoded protein.

### Cells

[0572] The polynucleotides, modified nucleic acids, enhanced modified RNA or ribonucleic acids of the invention can be transfected ex vivo into cells, which are subsequently transplanted into a subject. As non-limiting examples, the pharmaceutical compositions may include red blood cells to deliver modified RNA to liver and myeloid cells, virosomes to deliver modified RNA in virus-like particles (VLPs), and electroporated cells such as, but not limited to, from MAXCYTE® (Gaithersburg, MD) and from ERYTECH® (Lyon, France) to deliver modified RNA. Examples of use of red blood cells, viral particles and electroporated cells to deliver payloads other than polynucleotides, modified nucleic acids, enhanced modified RNA or ribonucleic acids have been documented (Godfrin et al., Expert Opin Biol Ther. 2012 12:127-133; Fang et al., Expert Opin Biol Ther. 2012 12:385-389; Hu et al., Proc Natl Acad Sci USA. 2011 108:10980-10985; Lund et al., Pharm Res. 2010 27:400-420; Huckriede et al., J Liposome Res. 2007; 17:39-47; Cusi, Hum Vaccin. 2006 2:1-7; de Jonge et al., Gene Ther. 2006 13:400-411; all of which are herein incorporated by reference in its entirety). The modified RNA may be delivered in synthetic VLPs synthesized by the methods described in International Pub No. WO2011085231 and US Pub No. 20110171248, each of which are herein incorporated by reference in their entireties.

[0573] Cell-based formulations of the polynucleotides, modified nucleic acids, enhanced modified RNA or ribonucleic acids of the invention may be used to ensure cell transfection (e.g., in the cellular carrier), alter the biodistribution of the modified nucleic acids, enhanced modified RNA or ribonucleic acids (e.g., by targeting the cell carrier to specific tissues or cell types), and/or increase the translation of encoded protein.

Introduction into Cells

[0574] A variety of methods are known in the art and suitable for introduction of nucleic acid into a cell, including viral and non-viral mediated techniques. Examples of typical non-viral mediated techniques include, but are not limited to, electroporation, calcium phosphate mediated transfer, nucleofection, sonoporation, heat shock, magnetofection, liposome mediated transfer, microinjection, microprojectile mediated transfer (nanoparticles), cationic polymer mediated transfer (DEAE-dextran, polyethylenimine, polyethylene glycol (PEG) and the like) or cell fusion.

[0575] The technique of sonoporaiton, or cellular sonication, is the use of sound (e.g., ultrasonic frequencies) for modifying the permeability of the cell plasma membrane. Sonoporation methods are known to those in the art and are taught for example as it relates to bacteria in US Patent Publication 20100196983 and as it relates to other cell types in, for example, US Patent Publication 20100009424, each of which are incorporated herein by reference in their entirety.

[0576] Electroporation techniques are also well known in the art. In one embodiment, modified nucleic acids, enhanced modified RNA or ribonucleic acids may be delivered by electroporation as described in Example 11.

### Hyaluronidase

[0577] The intramuscular or subcutaneous localized injection of polynucleotides, modified nucleic acids, enhanced modified RNA or ribonucleic acids of the invention can include hyaluronidase, which catalyzes the hydrolysis of hyaluronan. By catalyzing the hydrolysis of hyaluronan, a constituent of the interstitial barrier, hyaluronidase lowers the viscosity of hyaluronan, thereby increasing tissue permeability (Frost, Expert Opin. Drug Deliv. (2007) 4:427-440; herein incorporated by reference in its entirety). It is useful to speed their dispersion and systemic distribution of encoded proteins produced by transfected cells. Alternatively, the hyaluronidase can be used to increase the number of cells exposed to a modified nucleic acids, enhanced modified RNA or ribonucleic acids of the invention administered intramuscularly or subcutaneously.

### Nanoparticle Mimics

[0578] The polynucleotides, modified nucleic acids, enhanced modified RNA or ribonucleic acids of the invention may be encapsulated within and/or absorbed to a nanoparticle mimic. A nanoparticle mimic can mimic the delivery function organisms or particles such as, but not limited to, pathogens, viruses, bacteria, fungus, parasites, prions and cells. As a non-limiting example the polynucleotides, modified nucleic acids, enhanced modified RNA or ribonucleic acids of the invention may be encapsulated in a non-viron particle which can mimic the delivery function of a virus (see International Pub. No. WO2012006376 herein incorporated by reference in its entirety).

### Nanotubes

[0579] The polynucleotides, modified nucleic acids, enhanced modified RNA or ribonucleic acids of the invention can be attached or otherwise bound to at least one nanotube such as, but not limited to, rosette nanotubes, rosette nanotubes having twin bases with a linker, carbon nanotubes and/or single-walled carbon nanotubes, The polynucleotides, modified nucleic acids, enhanced modified RNA or ribonucleic acids may be bound to the nanotubes through forces such as, but not limited to, steric, ionic, covalent and/or other forces.

[0580] In one embodiment, the nanotube can release one or more polynucleotides, modified nucleic acids, enhanced modified RNA or ribonucleic acids into cells. The size and/or the surface structure of at least one nanotube may be altered so as to govern the interaction of the nanotubes within the body and/or to attach or bind to the polynucleotides, modified nucleic acids, enhanced modified RNA or ribonucleic acids disclosed herein. In one embodiment, the building block and/or the functional groups attached to the building block of the at least one nanotube may be altered to adjust the dimensions and/or properties of the nanotube. As a non-limiting example, the length of the nanotubes may be altered to hinder the nanotubes from passing through the holes in the walls of normal blood vessels but still small enough to pass through the larger holes in the blood vessels of tumor tissue.

[0581] In one embodiment, at least one nanotube may also be coated with delivery enhancing compounds including polymers, such as, but not limited to, polyethylene glycol. In another embodiment, at least one nanotube and/or the modified mRNA may be mixed with pharmaceutically acceptable excipients and/or delivery vehicles.

[0582] In one embodiment, the polynucleotides or modified mRNA are attached and/or otherwise bound to at least one rosette nanotube. The rosette nanotubes may be formed by a process known in the art and/or by the process described in International Publication No. WO2012094304, herein incorporated by reference in its entirety. At least one modified mRNA may be attached and/or otherwise bound to at least one rosette nanotube by a process as described in International Publication No. WO2012094304, herein incorporated by reference in its entirety, where rosette nanotubes or modules forming rosette nanotubes are mixed in aqueous media with at least one modified mRNA under conditions which may cause at least one modified mRNA to attach or otherwise bind to the rosette nanotubes.

### Conjugates

[0583] The polynucleotides, modified nucleic acids, enhanced modified RNA or ribonucleic acids of the invention include conjugates, such as a modified nucleic acids, enhanced modified RNA or ribonucleic acids covalently linked to a carrier or targeting group, or including two encoding regions that together produce a fusion protein (e.g., bearing a targeting group and therapeutic protein or peptide).

[0584] The conjugates of the invention include a naturally occurring substance, such as a protein (e.g., human serum albumin (HSA), low-density lipoprotein (LDL), high-density lipoprotein (HDL), or globulin); an carbohydrate (e.g., a dextran, pullulan, chitin, chitosan, inulin, cyclodextrin or hyaluronic acid); or a lipid. The ligand may also be a recombinant or synthetic molecule, such as a synthetic polymer, e.g., a synthetic polyamino acid, an oligonucleotide (e.g. an aptamer). Examples of polyamino acids include polyamino acid is a polylysine (PLL), poly L-aspartic acid, poly L-glutamic acid, styrene-maleic acid anhydride copolymer, poly(L-lactide-co-glycolied) copolymer, divinyl ether-maleic anhydride copolymer, N-(2-hydroxypropyl)methacrylamide copolymer (HMPA), polyethylene glycol (PEG), polyvinyl alcohol (PVA), polyurethane, poly(2-ethylacryllic acid), N-isopropylacrylamide polymers, or polyphosphazine. Example of polyamines include: polyethylenimine, polylysine (PLL), spermine, spermidine, polyamine, pseudopeptide-polyamine, peptidomimetic polyamine, dendrimer polyamine, arginine, amidine, protamine, cationic lipid, cationic porphyrin, quaternary salt of a polyamine, or an alpha helical peptide.

[0585] Representative U.S. patents that teach the preparation of polynucleotide conjugates, particularly to RNA, include, but are not limited to, U.S. Pat. Nos. 4,828,979; 4,948,882; 5,218,105; 5,525,465; 5,541,313; 5,545,730; 5,552,538; 5,578,717, 5,580,731; 5,591,584; 5,109,124; 5,118,802; 5,138,045; 5,414,077; 5,486,603; 5,512,439; 5,578,718; 5,608,046; 4,587,044; 4,605,735; 4,667,025; 4,762,779; 4,789,737; 4,824,941; 4,835,263; 4,876,335; 4,904,582; 4,958,013; 5,082,830; 5,112,963; 5,214,136; 5,082,830; 5,112,963; 5,214,136; 5,245,022; 5,254,469; 5,258,506; 5,262,536; 5,272,250; 5,292,873; 5,317,098; 5,371,241, 5,391,723; 5,416,203, 5,451,463; 5,510,475; 5,512,667; 5,514,785; 5,565,552; 5,567,810; 5,574,142; 5,585,481; 5,587,371; 5,595,726; 5,597,696; 5,599,923; 5,599,928 and 5,688,941; 6,294,664; 6,320,017; 6,576,752; 6,783,931; 6,900,297; 7,037,646; each of which is herein incorporated by reference in their entireties.

[0586] In one embodiment, the conjugate of the present invention may function as a carrier for the polynucleotide, modified nucleic acids, enhanced modified RNA or ribonucleic acids of the present invention. The conjugate may comprise a cationic polymer such as, but not limited to, polyamine, polylysine, polyalkylenimine, and polyethylenimine which may be grafted to with poly(ethylene glycol). As a non-limiting example, the conjugate may be similar to the polymeric conjugate and the method of synthesizing the polymeric conjugate described in U.S. Pat. No. 6,586,524 herein incorporated by reference in its entirety.

[0587] The conjugates can also include targeting groups, e.g., a cell or tissue targeting agent, e.g., a lectin, glycoprotein, lipid or protein, e.g., an antibody, that binds to a specified cell type such as a kidney cell. A targeting group can be a thyrotropin, melanotropin, lectin, glycoprotein, surfactant protein A, Mucin carbohydrate, multivalent lactose, multivalent galactose, N-acetyl-galactosamine, N-acetyl-gulucosamine multivalent mannose, multivalent fucose, glycosylated polyaminoacids, multivalent galactose, transferrin, bisphosphonate, polyglutamate, polyaspartate, a lipid, cholesterol, a steroid, bile acid, folate, vitamin B12, biotin, an RGD peptide, an RGD peptide mimetic or an aptamer.

[0588] Targeting groups can be proteins, e.g., glycoproteins, or peptides, e.g., molecules having a specific affinity for a co-ligand, or antibodies e.g., an antibody, that binds to a specified cell type such as a cancer cell, endothelial cell, or bone cell. Targeting groups may also include hormones and hormone receptors. They can also include non-peptidic species, such as lipids, lectins, carbohydrates, vitamins, cofactors, multivalent lactose, multivalent galactose, N-acetyl-galactosamine, N-acetyl-gulucosamine multivalent mannose, multivalent fucose, or aptamers. The ligand can be, for example, a lipopolysaccharide, or an activator of p38 MAP kinase.

[0589] The targeting group can be any ligand that is capable of targeting a specific receptor. Examples include, without limitation, folate, GalNAc, galactose, mannose, mannose-6P, apatamers, integrin receptor ligands, chemokine receptor ligands, transferrin, biotin, serotonin receptor ligands, PSMA, endothelin, GCPII, somatostatin, LDL, and HDL ligands. In particular embodiments, the targeting group is an aptamer. The aptamer can be unmodified or have any combination of modifications disclosed herein.

[0590] In one embodiment, pharmaceutical compositions of the present invention may include chemical modifications such as, but not limited to, modifications similar to locked nucleic acids.

[0591] Representative U.S. Patents that teach the preparation of locked nucleic acid (LNA) such as those from Santaris, include, but are not limited to, the following: U.S. Pat. Nos. 6,268,490; 6,670,461; 6,794,499; 6,998,484; 7,053,207; 7,084,125; and 7,399,845, each of which is herein incorporated by reference in its entirety.

[0592] Representative U.S. patents that teach the preparation of PNA compounds include, but are not limited to, U.S. Pat. Nos. 5,539,082; 5,714,331; and 5,719,262, each of which is herein incorporated by reference. Further teaching of PNA compounds can be found, for example, in Nielsen et al., Science, 1991, 254, 1497-1500.

[0593] Some embodiments featured in the invention include modified nucleic acids, enhanced modified RNA or ribonucleic acids with phosphorothioate backbones and oligonucleosides with other modified backbones, and in particular —CH₂—NH—CH₂—, —CH₂—N(CH₃)—O—CH₂-[known as a methylene (methylimino) or MMI backbone], —CH₂—O—N(CH₃)—CH₂—, —CH₂—N(CH₃)—N(CH₃)—CH₂—and —N(CH₃)—CH₂—CH₂-[wherein the native phosphodiester backbone is represented as —O—P(O)₂—O—CH₂-] of the above-referenced U.S. Pat. No. 5,489,677, and the amide backbones of the above-referenced U.S. Pat. No. 5,602,240. In some embodiments, the polynucleotides featured herein have morpholino backbone structures of the above-referenced U.S. Pat. No. 5,034,506.

[0594] Modifications at the 2′ position may also aid in delivery. Preferably, modifications at the 2′ position are not located in a polypeptide-coding sequence, i.e., not in a translatable region. Modifications at the 2′ position may be located in a 5′UTR, a 3′UTR and/or a tailing region. Modifications at the 2′ position can include one of the following at the 2′ position: H (i.e., 2′-deoxy); F; O—, S—, or N-alkyl; O—, S—, or N-alkenyl; O—, S- or N-alkynyl; or O-alkyl-O-alkyl, wherein the alkyl, alkenyl and alkynyl may be substituted or unsubstituted C₁ to C₁₀ alkyl or C₂ to C₁₀ alkenyl and alkynyl. Exemplary suitable modifications include O[(CH₂)ₙO]ₘCH₃, O(CH₂)ₙOCH₃, O(CH₂)ₙNH₂, O(CH₂)ₙCH₃, O(CH₂)ₙONH₂, and O(CH₂).ON[(CH₂)ₙCH₃)]₂, where n and m are from 1 to about 10. In other embodiments, the modified nucleic acids, enhanced modified RNA or ribonucleic acids include one of the following at the 2′ position: C₁ to C₁₀ lower alkyl, substituted lower alkyl, alkaryl, aralkyl, O-alkaryl or O-aralkyl, SH, SCH₃, OCN, C1, Br, CN, CF₃, OCF₃, SOCH₃, SO₂CH₃, ONO₂, NO₂, N₃, NH₂, heterocycloalkyl, heterocycloalkaryl, aminoalkylamino, polyalkylamino, substituted silyl, an RNA cleaving group, a reporter group, an intercalator, a group for improving the pharmacokinetic properties, or a group for improving the pharmacodynamic properties, and other substituents having similar properties. In some embodiments, the modification includes a 2′-methoxyethoxy (2′-O—CH₂CH₂OCH₃, also known as 2′-O-(2-methoxyethyl) or 2′-MOE) (Martin et al., Helv. Chim. Acta, 1995, 78:486-504) i.e., an alkoxy-alkoxy group. Another exemplary modification is 2′-dimethylaminooxyethoxy, i.e., a O(CH₂)₂ON(CH₃)₂ group, also known as 2′-DMAOE, as described in examples herein below, and 2′-dimethylaminoethoxyethoxy (also known in the art as 2′-O-dimethylaminoethoxyethyl or 2′-DMAEOE), i.e., 2′-O—CH₂—O—CH₂—N(CH₂)₂, also described in examples herein below. Other modifications include 2′-methoxy (2′-OCH₃), 2′-aminopropoxy (2′-OCH₂CH₂CH₂NH₂) and 2′-fluoro (2′-F). Similar modifications may also be made at other positions, particularly the 3′ position of the sugar on the 3′ terminal nucleotide or in 2′-5′ linked dsRNAs and the 5′ position of 5′ terminal nucleotide. Polynucleotides of the invention may also have sugar mimetics such as cyclobutyl moieties in place of the pentofuranosyl sugar. Representative U.S. patents that teach the preparation of such modified sugar structures include, but are not limited to, U.S. Pat. Nos. 4,981,957; 5,118,800; 5,319,080; 5,359,044; 5,393,878; 5,446,137; 5,466,786; 5,514,785; 5,519,134; 5,567,811; 5,576,427; 5,591,722; 5,597,909; 5,610,300; 5,627,053; 5,639,873; 5,646,265; 5,658,873; 5,670,633; and 5,700,920 and each of which is herein incorporated by reference.

[0595] In still other embodiments, the polynucleotides, modified nucleic acids, enhanced modified RNA or ribonucleic acids is covalently conjugated to a cell penetrating polypeptide. The cell-penetrating peptide may also include a signal sequence. The conjugates of the invention can be designed to have increased stability; increased cell transfection; and/or altered the biodistribution (e.g., targeted to specific tissues or cell types).

### Self-Assembled Nucleic Acid Nanoparticles

[0596] Self-assembled nanoparticles have a well-defined size which may be precisely controlled as the nucleic acid strands may be easily reprogrammable. For example, the optimal particle size for a cancer-targeting nanodelivery carrier is 20-100 nm as a diameter greater than 20 nm avoids renal clearance and enhances delivery to certain tumors through enhanced permeability and retention effect. Using self-assembled nucleic acid nanoparticles a single uniform population in size and shape having a precisely controlled spatial orientation and density of cancer-targeting ligands for enhanced delivery. As a non-limiting example, oligonucleotide nanoparticles were prepared using programmable self-assembly of short DNA fragments and therapeutic siRNAs. These nanoparticles are molecularly identical with controllable particle size and target ligand location and density. The DNA fragments and siRNAs self-assembled into a one-step reaction to generate DNA/siRNA tetrahedral nanoparticles for targeted in vivo delivery. (Lee et al., Nature Nanotechnology 2012 7:389-393).

### Excipients

[0597] Pharmaceutical formulations may additionally comprise a pharmaceutically acceptable excipient, which, as used herein, includes, but are not limited to, any and all solvents, dispersion media, diluents, or other liquid vehicles, dispersion or suspension aids, surface active agents, isotonic agents, thickening or emulsifying agents, preservatives, solid binders, lubricants and the like, as suited to the particular dosage form desired. Various excipients for formulating pharmaceutical compositions and techniques for preparing the composition are known in the art (see Remington: The Science and Practice of Pharmacy, 21^{st} Edition, A. R. Gennaro, Lippincott, Williams & Wilkins, Baltimore, MD, 2006; incorporated herein by reference). The use of a conventional excipient medium may be contemplated within the scope of the present disclosure, except insofar as any conventional excipient medium may be incompatible with a substance or its derivatives, such as by producing any undesirable biological effect or otherwise interacting in a deleterious manner with any other component(s) of the pharmaceutical composition.

[0598] In some embodiments, a pharmaceutically acceptable excipient may be at least 95%, at least 96%, at least 97%, at least 98%, at least 99%, or 100% pure. In some embodiments, an excipient may be approved for use for humans and for veterinary use. In some embodiments, an excipient may be approved by United States Food and Drug Administration. In some embodiments, an excipient may be of pharmaceutical grade. In some embodiments, an excipient may meet the standards of the United States Pharmacopoeia (USP), the European Pharmacopoeia (EP), the British Pharmacopoeia, and/or the International Pharmacopoeia.

[0599] Pharmaceutically acceptable excipients used in the manufacture of pharmaceutical compositions include, but are not limited to, inert diluents, dispersing and/or granulating agents, surface active agents and/or emulsifiers, disintegrating agents, binding agents, preservatives, buffering agents, lubricating agents, and/or oils. Such excipients may optionally be included in pharmaceutical formulations. The composition may also include excipients such as cocoa butter and suppository waxes, coloring agents, coating agents, sweetening, flavoring, and/or perfuming agents.

[0600] Exemplary diluents include, but are not limited to, calcium carbonate, sodium carbonate, calcium phosphate, dicalcium phosphate, calcium sulfate, calcium hydrogen phosphate, sodium phosphate lactose, sucrose, cellulose, microcrystalline cellulose, kaolin, mannitol, sorbitol, inositol, sodium chloride, dry starch, cornstarch, powdered sugar, etc., and/or combinations thereof.

[0601] Exemplary granulating and/or dispersing agents include, but are not limited to, potato starch, corn starch, tapioca starch, sodium starch glycolate, clays, alginic acid, guar gum, citrus pulp, agar, bentonite, cellulose and wood products, natural sponge, cation-exchange resins, calcium carbonate, silicates, sodium carbonate, cross-linked poly(vinyl-pyrrolidone) (crospovidone), sodium carboxymethyl starch (sodium starch glycolate), carboxymethyl cellulose, cross-linked sodium carboxymethyl cellulose (croscarmellose), methylcellulose, pregelatinized starch (starch 1500), microcrystalline starch, water insoluble starch, calcium carboxymethyl cellulose, magnesium aluminum silicate (Veegum), sodium lauryl sulfate, quaternary ammonium compounds, etc., and/or combinations thereof.

[0602] Exemplary surface active agents and/or emulsifiers include, but are not limited to, natural emulsifiers (e.g. acacia, agar, alginic acid, sodium alginate, tragacanth, chondrux, cholesterol, xanthan, pectin, gelatin, egg yolk, casein, wool fat, cholesterol, wax, and lecithin), colloidal clays (e.g. bentonite [aluminum silicate] and VEEGUM® [magnesium aluminum silicate]), long chain amino acid derivatives, high molecular weight alcohols (e.g. stearyl alcohol, cetyl alcohol, oleyl alcohol, triacetin monostearate, ethylene glycol distearate, glyceryl monostearate, and propylene glycol monostearate, polyvinyl alcohol), carbomers (e.g. carboxy polymethylene, polyacrylic acid, acrylic acid polymer, and carboxyvinyl polymer), carrageenan, cellulosic derivatives (e.g. carboxymethylcellulose sodium, powdered cellulose, hydroxymethyl cellulose, hydroxypropyl cellulose, hydroxypropyl methylcellulose, methylcellulose), sorbitan fatty acid esters (e.g. polyoxyethylene sorbitan monolaurate [TWEEN®20], polyoxyethylene sorbitan [TWEEN®60], polyoxyethylene sorbitan monooleate [TWEEN®80], sorbitan monopalmitate [SPAN®40], sorbitan monostearate [Span®60], sorbitan tristearate [Span®65], glyceryl monooleate, sorbitan monooleate [SPAN®80]), polyoxyethylene esters (e.g. polyoxyethylene monostearate [MYRJ©45], polyoxyethylene hydrogenated castor oil, polyethoxylated castor oil, polyoxymethylene stearate, and SOLUTOL®), sucrose fatty acid esters, polyethylene glycol fatty acid esters (e.g. CREMOPHOR®), polyoxyethylene ethers, (e.g. polyoxyethylene lauryl ether [BRIJ®30]), poly(vinyl-pyrrolidone), diethylene glycol monolaurate, triethanolamine oleate, sodium oleate, potassium oleate, ethyl oleate, oleic acid, ethyl laurate, sodium lauryl sulfate, PLUORINC®F 68, POLOXAMER®188, cetrimonium bromide, cetylpyridinium chloride, benzalkonium chloride, docusate sodium, etc. and/or combinations thereof.

[0603] Exemplary binding agents include, but are not limited to, starch (e.g. cornstarch and starch paste); gelatin; sugars (e.g. sucrose, glucose, dextrose, dextrin, molasses, lactose, lactitol, mannitol,); natural and synthetic gums (e.g. acacia, sodium alginate, extract of Irish moss, panwar gum, ghatti gum, mucilage of isapol husks, carboxymethylcellulose, methylcellulose, ethylcellulose, hydroxyethylcellulose, hydroxypropyl cellulose, hydroxypropyl methylcellulose, microcrystalline cellulose, cellulose acetate, poly(vinyl-pyrrolidone), magnesium aluminum silicate (VEEGUM®), and larch arabogalactan); alginates; polyethylene oxide; polyethylene glycol; inorganic calcium salts; silicic acid; polymethacrylates; waxes; water; alcohol; etc.; and combinations thereof.

[0604] Exemplary preservatives may include, but are not limited to, antioxidants, chelating agents, antimicrobial preservatives, antifungal preservatives, alcohol preservatives, acidic preservatives, and/or other preservatives. Exemplary antioxidants include, but are not limited to, alpha tocopherol, ascorbic acid, acorbyl palmitate, butylated hydroxyanisole, butylated hydroxytoluene, monothioglycerol, potassium metabisulfite, propionic acid, propyl gallate, sodium ascorbate, sodium bisulfite, sodium metabisulfite, and/or sodium sulfite. Exemplary chelating agents include ethylenediaminetetraacetic acid (EDTA), citric acid monohydrate, disodium edetate, dipotassium edetate, edetic acid, fumaric acid, malic acid, phosphoric acid, sodium edetate, tartaric acid, and/or trisodium edetate. Exemplary antimicrobial preservatives include, but are not limited to, benzalkonium chloride, benzethonium chloride, benzyl alcohol, bronopol, cetrimide, cetylpyridinium chloride, chlorhexidine, chlorobutanol, chlorocresol, chloroxylenol, cresol, ethyl alcohol, glycerin, hexetidine, imidurea, phenol, phenoxyethanol, phenylethyl alcohol, phenylmercuric nitrate, propylene glycol, and/or thimerosal. Exemplary antifungal preservatives include, but are not limited to, butyl paraben, methyl paraben, ethyl paraben, propyl paraben, benzoic acid, hydroxybenzoic acid, potassium benzoate, potassium sorbate, sodium benzoate, sodium propionate, and/or sorbic acid. Exemplary alcohol preservatives include, but are not limited to, ethanol, polyethylene glycol, phenol, phenolic compounds, bisphenol, chlorobutanol, hydroxybenzoate, and/or phenylethyl alcohol. Exemplary acidic preservatives include, but are not limited to, vitamin A, vitamin C, vitamin E, beta-carotene, citric acid, acetic acid, dehydroacetic acid, ascorbic acid, sorbic acid, and/or phytic acid. Other preservatives include, but are not limited to, tocopherol, tocopherol acetate, deteroxime mesylate, cetrimide, butylated hydroxyanisol (BHA), butylated hydroxytoluened (BHT), ethylenediamine, sodium lauryl sulfate (SLS), sodium lauryl ether sulfate (SLES), sodium bisulfite, sodium metabisulfite, potassium sulfite, potassium metabisulfite, GLYDANT PLUS®, PHENONIP®, methylparaben, GERMALL®115, GERMABEN®II, NEOLONE™, KATHON™, and/or EUXYL®.

[0605] Exemplary buffering agents include, but are not limited to, citrate buffer solutions, acetate buffer solutions, phosphate buffer solutions, ammonium chloride, calcium carbonate, calcium chloride, calcium citrate, calcium glubionate, calcium gluceptate, calcium gluconate, d-gluconic acid, calcium glycerophosphate, calcium lactate, propanoic acid, calcium levulinate, pentanoic acid, dibasic calcium phosphate, phosphoric acid, tribasic calcium phosphate, calcium hydroxide phosphate, potassium acetate, potassium chloride, potassium gluconate, potassium mixtures, dibasic potassium phosphate, monobasic potassium phosphate, potassium phosphate mixtures, sodium acetate, sodium bicarbonate, sodium chloride, sodium citrate, sodium lactate, dibasic sodium phosphate, monobasic sodium phosphate, sodium phosphate mixtures, tromethamine, magnesium hydroxide, aluminum hydroxide, alginic acid, pyrogen-free water, isotonic saline, Ringer's solution, ethyl alcohol, etc., and/or combinations thereof.

[0606] Exemplary lubricating agents include, but are not limited to, magnesium stearate, calcium stearate, stearic acid, silica, talc, malt, glyceryl behanate, hydrogenated vegetable oils, polyethylene glycol, sodium benzoate, sodium acetate, sodium chloride, leucine, magnesium lauryl sulfate, sodium lauryl sulfate, etc., and combinations thereof.

[0607] Exemplary oils include, but are not limited to, almond, apricot kernel, avocado, babassu, bergamot, black current seed, borage, cade, camomile, canola, caraway, carnauba, castor, cinnamon, cocoa butter, coconut, cod liver, coffee, corn, cotton seed, emu, eucalyptus, evening primrose, fish, flaxseed, geraniol, gourd, grape seed, hazel nut, hyssop, isopropyl myristate, jojoba, kukui nut, lavandin, lavender, lemon, litsea cubeba, macademia nut, mallow, mango seed, meadowfoam seed, mink, nutmeg, olive, orange, orange roughy, palm, palm kernel, peach kernel, peanut, poppy seed, pumpkin seed, rapeseed, rice bran, rosemary, safflower, sandalwood, sasquana, savoury, sea buckthorn, sesame, shea butter, silicone, soybean, sunflower, tea tree, thistle, tsubaki, vetiver, walnut, and wheat germ oils. Exemplary oils include, but are not limited to, butyl stearate, caprylic triglyceride, capric triglyceride, cyclomethicone, diethyl sebacate, dimethicone 360, isopropyl myristate, mineral oil, octyldodecanol, oleyl alcohol, silicone oil, and/or combinations thereof.

[0608] Excipients such as cocoa butter and suppository waxes, coloring agents, coating agents, sweetening, flavoring, and/or perfuming agents can be present in the composition, according to the judgment of the formulator.

### Delivery

[0609] The present disclosure encompasses the delivery of polynucleotides, modified nucleic acids, enhanced modified RNA or ribonucleic acids for any of therapeutic, pharmaceutical, diagnostic or imaging by any appropriate route taking into consideration likely advances in the sciences of drug delivery. Delivery may be naked or formulated.

### Naked Delivery

[0610] The polynucleotides, modified nucleic acids, enhanced modified RNA or ribonucleic acids of the present invention may be delivered to a cell naked. As used herein in, “naked” refers to delivering polynucleotides, modified nucleic acids, enhanced modified RNA or ribonucleic acids free from agents which promote transfection. For example, the polynucleotides, modified nucleic acids, enhanced modified RNA or ribonucleic acids delivered to the cell may contain no modifications. The naked polynucleotides, modified nucleic acids, enhanced modified RNA or ribonucleic acids may be delivered to the cell using routes of administration known in the art and described herein.

### Formulated Delivery

[0611] The polynucleotides, modified nucleic acids, enhanced modified RNA or ribonucleic acids of the present invention may be formulated, using the methods described herein. The formulations may contain polynucleotides, modified nucleic acids, enhanced modified RNA or ribonucleic acids which may be modified and/or unmodified. The formulations may further include, but are not limited to, cell penetration agents, a pharmaceutically acceptable carrier, a delivery agent, a bioerodible or biocompatible polymer, a solvent, and a sustained-release delivery depot. The formulated polynucleotides, modified nucleic acids or enhanced modified nucleic acids may be delivered to the cell using routes of administration known in the art and described herein.

[0612] The compositions may also be formulated for direct delivery to an organ or tissue in any of several ways in the art including, but not limited to, direct soaking or bathing, via a catheter, by gels, powder, ointments, creams, gels, lotions, and/or drops, by using substrates such as fabric or biodegradable materials coated or impregnated with the compositions, and the like.

[0613] In certain embodiments, the formulations include one or more cell penetration agents, e.g., transfection agents. In one specific embodiment, a ribonucleic acid is mixed or admixed with a transfection agent (or mixture thereof) and the resulting mixture is employed to transfect cells. Preferred transfection agents are cationic lipid compositions, particularly monovalent and polyvalent cationic lipid compositions, more particularly “LIPOFECTIN,” “LIPOFECTACE,” “LIPOFECTAMINE,” “CELLFECTIN,” DMRIE-C, DMRIE, DOTAP, DOSPA, and DOSPER, and dendrimer compositions, particularly G5-G10 dendrimers, including dense star dendrimers, PAMAM dendrimers, grafted dendrimers, and dendrimers known as dendrigrafts and “SUPERFECT.” In a second specific transfection method, a ribonucleic acid is conjugated to a nucleic acid-binding group, for example a polyamine and more particularly a spermine, which is then introduced into the cell or admixed with a transfection agent (or mixture thereof) and the resulting mixture is employed to transfect cells. In a third specific embodiment, a mixture of one or more transfection-enhancing peptides, proteins, or protein fragments, including fusagenic peptides or proteins, transport or trafficking peptides or proteins, receptor-ligand peptides or proteins, or nuclear localization peptides or proteins and/or their modified analogs (e.g., spermine modified peptides or proteins) or combinations thereof are mixed with and complexed with a ribonucleic acid to be introduced into a cell, optionally being admixed with transfection agent and the resulting mixture is employed to transfect cells. Further, a component of a transfection agent (e.g., lipids, cationic lipids or dendrimers) is covalently conjugated to selected peptides, proteins, or protein fragments directly or via a linking or spacer group. Of particular interest in this embodiment are peptides or proteins that are fusagenic, membrane-permeabilizing, transport or trafficking, or which function for cell-targeting. The peptide- or protein-transfection agent complex is combined with a ribonucleic acid and employed for transfection.

[0614] In certain embodiments, the formulations include a pharmaceutically acceptable carrier that causes the effective amount of polynucleotide, modified nucleic acid, or ribonucleic acid to be substantially retained in a target tissue containing the cell.

### Administration

[0615] The polynucleotides, modified nucleic acids, enhanced modified RNA or ribonucleic acids of the present invention may be administered by any route which results in a therapeutically effective outcome. These include, but are not limited to enteral, gastroenteral, epidural, oral, transdermal, epidural (peridural), intracerebral (into the cerebrum), intracerebroventricular (into the cerebral ventricles), epicutaneous (application onto the skin), intradermal, (into the skin itself), subcutaneous (under the skin), nasal administration (through the nose), intravenous (into a vein), intraarterial (into an artery), intramuscular (into a muscle), intracardiac (into the heart), intraosseous infusion (into the bone marrow), intrathecal (into the spinal canal), intraperitoneal, (infusion or injection into the peritoneum), intravesical infusion, intravitreal, (through the eye), intracavernous injection, (into the base of the penis), intravaginal administration, intrauterine, extra-amniotic administration, transdermal (diffusion through the intact skin for systemic distribution), transmucosal (diffusion through a mucous membrane), insufflation (snorting), sublingual, sublabial, enema, eye drops (onto the conjunctiva), or in ear drops.

[0616] In one embodiment, provided are compositions for generation of an in vivo depot containing a polynucleotide, modified nucleic acid or engineered ribonucleotide. For example, the composition contains a bioerodible, biocompatible polymer, a solvent present in an amount effective to plasticize the polymer and form a gel therewith, and a polynucleotide, modified nucleic acid or engineered ribonucleic acid. In certain embodiments the composition also includes a cell penetration agent as described herein. In other embodiments, the composition also contains a thixotropic amount of a thixotropic agent mixable with the polymer so as to be effective to form a thixotropic composition. Further compositions include a stabilizing agent, a bulking agent, a chelating agent, or a buffering agent.

[0617] In other embodiments, provided are sustained-release delivery depots, such as for administration of a polynucleotide, modified nucleic acid, or engineered ribonucleic acid an environment (meaning an organ or tissue site) in a patient. Such depots generally contain an engineered ribonucleic acid and a flexible chain polymer where both the engineered ribonucleic acid and the flexible chain polymer are entrapped within a porous matrix of a crosslinked matrix protein. Usually, the pore size is less than 1 mm, such as 900 nm, 800 nm, 700 nm, 600 nm, 500 nm, 400 nm, 300 nm, 200 nm, 100 nm, or less than 100 nm. Usually the flexible chain polymer is hydrophilic. Usually the flexible chain polymer has a molecular weight of at least 50 kDa, such as 75 kDa, 100 kDa, 150 kDa, 200 kDa, 250 kDa, 300 kDa, 400 kDa, 500 kDa, or greater than 500 kDa. Usually the flexible chain polymer has a persistence length of less than 10%, such as 9, 8, 7, 6, 5, 4, 3, 2, 1 or less than 1% of the persistence length of the matrix protein. Usually the flexible chain polymer has a charge similar to that of the matrix protein. In some embodiments, the flexible chain polymer alters the effective pore size of a matrix of crosslinked matrix protein to a size capable of sustaining the diffusion of the engineered ribonucleic acid from the matrix into a surrounding tissue comprising a cell into which the polynucleotide, modified nucleic acid, engineered ribonucleic acid is capable of entering.

[0618] In specific embodiments, compositions may be administered in a way which allows them cross the blood-brain barrier, vascular barrier, or other epithelial barrier. Non-limiting routes of administration for the polynucleotides, modified nucleic acids, enhanced modified RNA or ribonucleic acids of the present invention are described below.

[0619] The present invention provides methods comprising administering polynucleotides, modified mRNAs and their encoded proteins or complexes in accordance with the invention to a subject in need thereof. Nucleic acids, proteins or complexes, or pharmaceutical, imaging, diagnostic, or prophylactic compositions thereof, may be administered to a subject using any amount and any route of administration effective for preventing, treating, diagnosing, or imaging a disease, disorder, and/or condition (e.g., a disease, disorder, and/or condition relating to working memory deficits). The exact amount required will vary from subject to subject, depending on the species, age, and general condition of the subject, the severity of the disease, the particular composition, its mode of administration, its mode of activity, and the like. Compositions in accordance with the invention are typically formulated in dosage unit form for ease of administration and uniformity of dosage. It will be understood, however, that the total daily usage of the compositions of the present invention will be decided by the attending physician within the scope of sound medical judgment. The specific therapeutically effective, prophylactially effective, or appropriate imaging dose level for any particular patient will depend upon a variety of factors including the disorder being treated and the severity of the disorder; the activity of the specific compound employed; the specific composition employed; the age, body weight, general health, sex and diet of the patient; the time of administration, route of administration, and rate of excretion of the specific compound employed; the duration of the treatment; drugs used in combination or coincidental with the specific compound employed; and like factors well known in the medical arts.

### Parenteral and Injectible Administration

[0620] Liquid dosage forms for oral and parenteral administration include, but are not limited to, pharmaceutically acceptable emulsions, microemulsions, solutions, suspensions, syrups, and/or elixirs. In addition to active ingredients, liquid dosage forms may comprise inert diluents commonly used in the art such as, for example, water or other solvents, solubilizing agents and emulsifiers such as ethyl alcohol, isopropyl alcohol, ethyl carbonate, ethyl acetate, benzyl alcohol, benzyl benzoate, propylene glycol, 1,3-butylene glycol, dimethylformamide, oils (in particular, cottonseed, groundnut, corn, germ, olive, castor, and sesame oils), glycerol, tetrahydrofurfuryl alcohol, polyethylene glycols and fatty acid esters of sorbitan, and mixtures thereof. Besides inert diluents, oral compositions can include adjuvants such as wetting agents, emulsifying and suspending agents, sweetening, flavoring, and/or perfuming agents. In certain embodiments for parenteral administration, compositions are mixed with solubilizing agents such as CREMOPHOR®, alcohols, oils, modified oils, glycols, polysorbates, cyclodextrins, polymers, and/or combinations thereof.

[0621] Injectable preparations, for example, sterile injectable aqueous or oleaginous suspensions may be formulated according to the known art using suitable dispersing agents, wetting agents, and/or suspending agents. Sterile injectable preparations may be sterile injectable solutions, suspensions, and/or emulsions in nontoxic parenterally acceptable diluents and/or solvents, for example, as a solution in 1,3-butanediol. Among the acceptable vehicles and solvents that may be employed are water, Ringer's solution, U.S.P., and isotonic sodium chloride solution. Sterile, fixed oils are conventionally employed as a solvent or suspending medium. For this purpose any bland fixed oil can be employed including synthetic mono- or diglycerides. Fatty acids such as oleic acid can be used in the preparation of injectables.

[0622] Injectable formulations can be sterilized, for example, by filtration through a bacterial-retaining filter, and/or by incorporating sterilizing agents in the form of sterile solid compositions which can be dissolved or dispersed in sterile water or other sterile injectable medium prior to use.

[0623] In order to prolong the effect of an active ingredient, it is often desirable to slow the absorption of the active ingredient from subcutaneous or intramuscular injection. This may be accomplished by the use of a liquid suspension of crystalline or amorphous material with poor water solubility. The rate of absorption of the drug then depends upon its rate of dissolution which, in turn, may depend upon crystal size and crystalline form. Alternatively, delayed absorption of a parenterally administered drug form is accomplished by dissolving or suspending the drug in an oil vehicle. Injectable depot forms are made by forming microencapsule matrices of the drug in biodegradable polymers such as polylactide-polyglycolide. Depending upon the ratio of drug to polymer and the nature of the particular polymer employed, the rate of drug release can be controlled. Examples of other biodegradable polymers include poly(orthoesters) and poly(anhydrides). Depot injectable formulations are prepared by entrapping the drug in liposomes or microemulsions which are compatible with body tissues.

### Rectal and Vaginal Administration

[0624] Compositions for rectal or vaginal administration are typically suppositories which can be prepared by mixing compositions with suitable non-irritating excipients such as cocoa butter, polyethylene glycol or a suppository wax which are solid at ambient temperature but liquid at body temperature and therefore melt in the rectum or vaginal cavity and release the active ingredient.

### Oral Administration

[0625] Solid dosage forms for oral administration include capsules, tablets, pills, powders, and granules. In such solid dosage forms, an active ingredient is mixed with at least one inert, pharmaceutically acceptable excipient such as sodium citrate or dicalcium phosphate and/or fillers or extenders (e.g. starches, lactose, sucrose, glucose, mannitol, and silicic acid), binders (e.g. carboxymethylcellulose, alginates, gelatin, polyvinylpyrrolidinone, sucrose, and acacia), humectants (e.g. glycerol), disintegrating agents (e.g. agar, calcium carbonate, potato or tapioca starch, alginic acid, certain silicates, and sodium carbonate), solution retarding agents (e.g. paraffin), absorption accelerators (e.g. quaternary ammonium compounds), wetting agents (e.g. cetyl alcohol and glycerol monostearate), absorbents (e.g. kaolin and bentonite clay), and lubricants (e.g. talc, calcium stearate, magnesium stearate, solid polyethylene glycols, sodium lauryl sulfate), and mixtures thereof. In the case of capsules, tablets and pills, the dosage form may comprise buffering agents.

### Topical or Transdermal Administration

[0626] As described herein, compositions containing the polynucleotides, modified nucleic acids, enhanced modified RNA or ribonucleic acids of the invention may be formulated for administration topically. The skin may be an ideal target site for delivery as it is readily accessible. Gene expression may be restricted not only to the skin, potentially avoiding nonspecific toxicity, but also to specific layers and cell types within the skin.

[0627] The site of cutaneous expression of the delivered compositions will depend on the route of nucleic acid delivery. Three routes are commonly considered to deliver polynucleotides, modified nucleic acids, enhanced modified RNA or ribonucleic acids to the skin: (i) topical application (e.g. for local/regional treatment); (ii) intradermal injection (e.g. for local/regional treatment); and (iii) systemic delivery (e.g. for treatment of dermatologic diseases that affect both cutaneous and extracutaneous regions). Polynucleotides, modified nucleic acids, enhanced modified RNA or ribonucleic acids can be delivered to the skin by several different approaches known in the art. Most topical delivery approaches have been shown to work for delivery of DNA, such as but not limited to, topical application of non-cationic liposome-DNA complex, cationic liposome-DNA complex, particle-mediated (gene gun), puncture-mediated gene transfections, and viral delivery approaches. After delivery of the nucleic acid, gene products have been detected in a number of different skin cell types, including, but not limited to, basal keratinocytes, sebaceous gland cells, dermal fibroblasts and dermal macrophages.

[0628] In one embodiment, the invention provides for a variety of dressings (e.g., wound dressings) or bandages (e.g., adhesive bandages) for conveniently and/or effectively carrying out methods of the present invention. Typically dressing or bandages may comprise sufficient amounts of pharmaceutical compositions and/or polynucleotides, modified nucleic acids, enhanced modified RNA or ribonucleic acids described herein to allow a user to perform multiple treatments of a subject(s).

[0629] In one embodiment, the invention provides for the polynucleotides, modified nucleic acids, enhanced modified RNA or ribonucleic acids compositions to be delivered in more than one injection.

[0630] In one embodiment, before topical and/or transdermal administration at least one area of tissue, such as skin, may be subjected to a device and/or solution which may increase permeability. In one embodiment, the tissue may be subjected to an abrasion device to increase the permeability of the skin (see U.S. Patent Publication No. 20080275468, herein incorporated by reference in its entirety). In another embodiment, the tissue may be subjected to an ultrasound enhancement device. An ultrasound enhancement device may include, but is not limited to, the devices described in U.S. Publication No. 20040236268 and U.S. Pat. Nos. 6,491,657 and 6,234,990; each of which are herein incorporated by reference in their entireties. Methods of enhancing the permeability of tissue are described in U.S. Publication Nos. 20040171980 and 20040236268 and U.S. Pat. No. 6,190,315; each of which are herein incorporated by reference in their entireties.

[0631] In one embodiment, a device may be used to increase permeability of tissue before delivering formulations of modified mRNA described herein. The permeability of skin may be measured by methods known in the art and/or described in U.S. Pat. No. 6,190,315, herein incorporated by reference in its entirety. As a non-limiting example, a modified mRNA formulation may be delivered by the drug delivery methods described in U.S. Pat. No. 6,190,315, herein incorporated by reference in its entirety.

[0632] In another non-limiting example tissue may be treated with a eutectic mixture of local anesthetics (EMLA) cream before, during and/or after the tissue may be subjected to a device which may increase permeability. Katz et al. (Anesth Analg (2004); 98:371-76; herein incorporated by reference in its entirety) showed that using the EMLA cream in combination with a low energy, an onset of superficial cutaneous analgesia was seen as fast as 5 minutes after a pretreatment with a low energy ultrasound.

[0633] In one embodiment, enhancers may be applied to the tissue before, during, and/or after the tissue has been treated to increase permeability. Enhancers include, but are not limited to, transport enhancers, physical enhancers, and cavitation enhancers. Non-limiting examples of enhancers are described in U.S. Pat. No. 6,190,315, herein incorporated by reference in its entirety.

[0634] In one embodiment, a device may be used to increase permeability of tissue before delivering formulations of modified mRNA described herein, which may further contain a substance that invokes an immune response. In another non-limiting example, a formulation containing a substance to invoke an immune response may be delivered by the methods described in U.S. Publication Nos. 20040171980 and 20040236268; each of which are herein incorporated by reference in their entireties.

[0635] Dosage forms for topical and/or transdermal administration of a composition may include ointments, pastes, creams, lotions, gels, powders, solutions, sprays, inhalants and/or patches. Generally, an active ingredient is admixed under sterile conditions with a pharmaceutically acceptable excipient and/or any needed preservatives and/or buffers as may be required. Additionally, the present invention contemplates the use of transdermal patches, which often have the added advantage of providing controlled delivery of a compound to the body. Such dosage forms may be prepared, for example, by dissolving and/or dispensing the compound in the proper medium. Alternatively or additionally, rate may be controlled by either providing a rate controlling membrane and/or by dispersing the compound in a polymer matrix and/or gel.

[0636] Formulations suitable for topical administration include, but are not limited to, liquid and/or semi liquid preparations such as liniments, lotions, oil in water and/or water in oil emulsions such as creams, ointments and/or pastes, and/or solutions and/or suspensions.

[0637] Topically-administrable formulations may, for example, comprise from about 0.1% to about 10% (w/w) active ingredient, although the concentration of active ingredient may be as high as the solubility limit of the active ingredient in the solvent. Formulations for topical administration may further comprise one or more of the additional ingredients described herein.

### Depot Administration

[0638] As described herein, in some embodiments, the composition is formulated in depots for extended release. Generally, a specific organ or tissue (a “target tissue”) is targeted for administration.

[0639] In some aspects of the invention, the nucleic acids (particularly ribonucleic acids encoding polypeptides) are spatially retained within or proximal to a target tissue. Provided are method of providing a composition to a target tissue of a mammalian subject by contacting the target tissue (which contains one or more target cells) with the composition under conditions such that the composition, in particular the nucleic acid component(s) of the composition, is substantially retained in the target tissue, meaning that at least 10, 20, 30, 40, 50, 60, 70, 80, 85, 90, 95, 96, 97, 98, 99, 99.9, 99.99 or greater than 99.99% of the composition is retained in the target tissue. Advantageously, retention is determined by measuring the amount of the nucleic acid present in the composition that enters one or more target cells. For example, at least 1, 5, 10, 20, 30, 40, 50, 60, 70, 80, 85, 90, 95, 96, 97, 98, 99, 99.9, 99.99 or greater than 99.99% of the nucleic acids administered to the subject are present intracellularly at a period of time following administration. For example, intramuscular injection to a mammalian subject is performed using an aqueous composition containing a ribonucleic acid and a transfection reagent, and retention of the composition is determined by measuring the amount of the ribonucleic acid present in the muscle cells.

[0640] Aspects of the invention are directed to methods of providing a composition to a target tissue of a mammalian subject, by contacting the target tissue (containing one or more target cells) with the composition under conditions such that the composition is substantially retained in the target tissue. In another embodiment, a polynucleotide, ribonucleic acid engineered to avoid an innate immune response of a cell into which the ribonucleic acid enters, where the ribonucleic acid contains a nucleotide sequence encoding a polypeptide of interest, under conditions such that the polypeptide of interest is produced in at least one target cell. The compositions generally contain a cell penetration agent, although “naked” nucleic acid (such as nucleic acids without a cell penetration agent or other agent) is also contemplated, and a pharmaceutically acceptable carrier.

[0641] In some circumstances, the amount of a protein produced by cells in a tissue is desirably increased. Preferably, this increase in protein production is spatially restricted to cells within the target tissue. Thus, provided are methods of increasing production of a protein of interest in a tissue of a mammalian subject. A composition is provided that contains a ribonucleic acid that is engineered to avoid an innate immune response of a cell into which the ribonucleic acid enters and encodes the polypeptide of interest and the composition is characterized in that a unit quantity of composition has been determined to produce the polypeptide of interest in a substantial percentage of cells contained within a predetermined volume of the target tissue.

[0642] In some embodiments, the composition includes a plurality of different ribonucleic acids, where one or more than one of the ribonucleic acids is engineered to avoid an innate immune response of a cell into which the ribonucleic acid enters, and where one or more than one of the ribonucleic acids encodes a polypeptide of interest. Optionally, the composition also contains a cell penetration agent to assist in the intracellular delivery of the ribonucleic acid. A determination is made of the dose of the composition required to produce the polypeptide of interest in a substantial percentage of cells contained within the predetermined volume of the target tissue (generally, without inducing significant production of the polypeptide of interest in tissue adjacent to the predetermined volume, or distally to the target tissue). Subsequent to this determination, the determined dose is introduced directly into the tissue of the mammalian subject.

[0643] In one embodiment, the invention provides for the polynucleotides, modified nucleic acids, enhanced modified RNA or ribonucleic acids to be delivered in more than one injection or by split dose injections.

[0644] In one embodiment, the invention may be retained near target tissue using a small disposable drug reservoir or patch pump. Non-limiting examples of patch pumps include those manufactured and/or sold by BD®, (Franklin Lakes, NJ), Insulet Corporation (Bedford, MA), SteadyMed Therapeutics (San Francisco, CA), Medtronic (Minneapolis, MN), UniLife (York, PA), Valeritas (Bridgewater, NJ), and SpringLeaf Therapeutics (Boston, MA).

### Pulmonary Administration

[0645] A pharmaceutical composition may be prepared, packaged, and/or sold in a formulation suitable for pulmonary administration via the buccal cavity. Such a formulation may comprise dry particles which comprise the active ingredient and which have a diameter in the range from about 0.5 nm to about 7 nm or from about 1 nm to about 6 nm. Such compositions are suitably in the form of dry powders for administration using a device comprising a dry powder reservoir to which a stream of propellant may be directed to disperse the powder and/or using a self propelling solvent/powder dispensing container such as a device comprising the active ingredient dissolved and/or suspended in a low-boiling propellant in a sealed container. Such powders comprise particles wherein at least 98% of the particles by weight have a diameter greater than 0.5 nm and at least 95% of the particles by number have a diameter less than 7 nm. Alternatively, at least 95% of the particles by weight have a diameter greater than 1 nm and at least 90% of the particles by number have a diameter less than 6 nm. Dry powder compositions may include a solid fine powder diluent such as sugar and are conveniently provided in a unit dose form.

[0646] Low boiling propellants generally include liquid propellants having a boiling point of below 65° F. at atmospheric pressure. Generally the propellant may constitute 50% to 99.9% (w/w) of the composition, and active ingredient may constitute 0.1% to 20% (w/w) of the composition. A propellant may further comprise additional ingredients such as a liquid non-ionic and/or solid anionic surfactant and/or a solid diluent (which may have a particle size of the same order as particles comprising the active ingredient).

[0647] Pharmaceutical compositions formulated for pulmonary delivery may provide an active ingredient in the form of droplets of a solution and/or suspension. Such formulations may be prepared, packaged, and/or sold as aqueous and/or dilute alcoholic solutions and/or suspensions, optionally sterile, comprising active ingredient, and may conveniently be administered using any nebulization and/or atomization device. Such formulations may further comprise one or more additional ingredients including, but not limited to, a flavoring agent such as saccharin sodium, a volatile oil, a buffering agent, a surface active agent, and/or a preservative such as methylhydroxybenzoate. Droplets provided by this route of administration may have an average diameter in the range from about 0.1 nm to about 200 nm.

### Intranasal, Nasal and Buccal Administration

[0648] Formulations described herein as being useful for pulmonary delivery are useful for intranasal delivery of a pharmaceutical composition. Another formulation suitable for intranasal administration is a coarse powder comprising the active ingredient and having an average particle from about 0.2 m to 500 m. Such a formulation is administered in the manner in which snuff is taken, i.e. by rapid inhalation through the nasal passage from a container of the powder held close to the nose.

[0649] Formulations suitable for nasal administration may, for example, comprise from about as little as 0.1% (w/w) and as much as 100% (w/w) of active ingredient, and may comprise one or more of the additional ingredients described herein. A pharmaceutical composition may be prepared, packaged, and/or sold in a formulation suitable for buccal administration. Such formulations may, for example, be in the form of tablets and/or lozenges made using conventional methods, and may, for example, 0.1% to 20% (w/w) active ingredient, the balance comprising an orally dissolvable and/or degradable composition and, optionally, one or more of the additional ingredients described herein. Alternately, formulations suitable for buccal administration may comprise a powder and/or an aerosolized and/or atomized solution and/or suspension comprising active ingredient. Such powdered, aerosolized, and/or aerosolized formulations, when dispersed, may have an average particle and/or droplet size in the range from about 0.1 nm to about 200 nm, and may further comprise one or more of any additional ingredients described herein

### Ophthalmic Administration

[0650] A pharmaceutical composition may be prepared, packaged, and/or sold in a formulation suitable for ophthalmic administration. Such formulations may, for example, be in the form of eye drops including, for example, a 0.1/1.0% (w/w) solution and/or suspension of the active ingredient in an aqueous or oily liquid excipient. Such drops may further comprise buffering agents, salts, and/or one or more other of any additional ingredients described herein. Other ophthalmically-administrable formulations which are useful include those which comprise the active ingredient in microcrystalline form and/or in a liposomal preparation. Ear drops and/or eye drops are contemplated as being within the scope of this invention.

### Payload Administration: Detectable Agents and Therapeutic Agents

[0651] The polynucleotides, modified nucleic acids, enhanced modified RNA or ribonucleic acids described herein can be used in a number of different scenarios in which delivery of a substance (the “payload”) to a biological target is desired, for example delivery of detectable substances for detection of the target, or delivery of a therapeutic agent. Detection methods can include, but are not limited to, both imaging in vitro and in vivo imaging methods, e.g., immunohistochemistry, bioluminescence imaging (BLI), Magnetic Resonance Imaging (MRI), positron emission tomography (PET), electron microscopy, X-ray computed tomography, Raman imaging, optical coherence tomography, absorption imaging, thermal imaging, fluorescence reflectance imaging, fluorescence microscopy, fluorescence molecular tomographic imaging, nuclear magnetic resonance imaging, X-ray imaging, ultrasound imaging, photoacoustic imaging, lab assays, or in any situation where tagging/staining/imaging is required.

[0652] The polynucleotides, modified nucleic acids, enhanced modified RNA or ribonucleic acids can be designed to include both a linker and a payload in any useful orientation. For example, a linker having two ends is used to attach one end to the payload and the other end to the nucleobase, such as at the C-7 or C-8 positions of the deaza-adenosine or deaza-guanosine or to the N-3 or C-5 positions of cytosine or uracil. The polynucleotide of the invention can include more than one payload (e.g., a label and a transcription inhibitor), as well as a cleavable linker.

[0653] In one embodiment, the modified nucleotide is a modified 7-deaza-adenosine triphosphate, where one end of a cleavable linker is attached to the C7 position of 7-deaza-adenine, the other end of the linker is attached to an inhibitor (e.g., to the C5 position of the nucleobase on a cytidine), and a label (e.g., Cy5) is attached to the center of the linker (see, e.g., compound 1 of A*pCp C5 Parg Capless in FIG. 5 and columns 9 and 10 of U.S. Pat. No. 7,994,304, incorporated herein by reference). Upon incorporation of the modified 7-deaza-adenosine triphosphate to an encoding region, the resulting polynucleotide having a cleavable linker attached to a label and an inhibitor (e.g., a polymerase inhibitor). Upon cleavage of the linker (e.g., with reductive conditions to reduce a linker having a cleavable disulfide moiety), the label and inhibitor are released. Additional linkers and payloads (e.g., therapeutic agents, detectable labels, and cell penetrating payloads) are described herein.

[0654] For example, the polynucleotides, modified nucleic acids, enhanced modified RNA or ribonucleic acids described herein can be used in reprogramming induced pluripotent stem cells (iPS cells), which can directly track cells that are transfected compared to total cells in the cluster. In another example, a drug that may be attached to the modified nucleic acids, enhanced modified RNA or ribonucleic acids via a linker and may be fluorescently labeled can be used to track the drug in vivo, e.g. intracellularly. Other examples include, but are not limited to, the use of polynucleotides, modified nucleic acids, enhanced modified RNA or ribonucleic acids in reversible drug delivery into cells.

[0655] The polynucleotides, modified nucleic acids, enhanced modified RNA or ribonucleic acids described herein can be used in intracellular targeting of a payload, e.g., detectable or therapeutic agent, to specific organelle. Exemplary intracellular targets can include, but are not limited to, the nuclear localization for advanced mRNA processing, or a nuclear localization sequence (NLS) linked to the mRNA containing an inhibitor.

[0656] In addition, the polynucleotides, modified nucleic acids, enhanced modified RNA or ribonucleic acids described herein can be used to deliver therapeutic agents to cells or tissues, e.g., in living animals. For example, the polynucleotides, modified nucleic acids, enhanced modified RNA or ribonucleic acids described herein can be used to deliver highly polar chemotherapeutics agents to kill cancer cells. The polynucleotides, modified nucleic acids, enhanced modified RNA or ribonucleic acids attached to the therapeutic agent through a linker can facilitate member permeation allowing the therapeutic agent to travel into a cell to reach an intracellular target.

[0657] In another example, the polynucleotides, modified nucleic acids, enhanced modified RNA or ribonucleic acids can be attached to the polynucleotides, modified nucleic acids, enhanced modified RNA or ribonucleic acids a viral inhibitory peptide (VIP) through a cleavable linker. The cleavable linker can release the VIP and dye into the cell. In another example, the polynucleotides, modified nucleic acids, enhanced modified RNA or ribonucleic acids can be attached through the linker to an ADP-ribosylate, which is responsible for the actions of some bacterial toxins, such as cholera toxin, diphtheria toxin, and pertussis toxin. These toxin proteins are ADP-ribosyltransferases that modify target proteins in human cells. For example, cholera toxin ADP-ribosylates G proteins modifies human cells by causing massive fluid secretion from the lining of the small intestine, which results in life-threatening diarrhea.

[0658] In some embodiments, the payload may be a therapeutic agent such as a cytotoxin, radioactive ion, chemotherapeutic, or other therapeutic agent. A cytotoxin or cytotoxic agent includes any agent that may be detrimental to cells. Examples include, but are not limited to, taxol, cytochalasin B, gramicidin D, ethidium bromide, emetine, mitomycin, etoposide, teniposide, vincristine, vinblastine, colchicine, doxorubicin, daunorubicin, dihydroxyanthracinedione, mitoxantrone, mithramycin, actinomycin D, 1-dehydrotestosterone, glucocorticoids, procaine, tetracaine, lidocaine, propranolol, puromycin, maytansinoids, e.g., maytansinol (see U.S. Pat. No. 5,208,020 incorporated herein in its entirety), rachelmycin (CC-1065, see U.S. Pat. Nos. 5,475,092, 5,585,499, and 5,846,545, all of which are incorporated herein by reference), and analogs or homologs thereof. Radioactive ions include, but are not limited to iodine (e.g., iodine 125 or iodine 131), strontium 89, phosphorous, palladium, cesium, iridium, phosphate, cobalt, yttrium 90, samarium 153, and praseodymium. Other therapeutic agents include, but are not limited to, antimetabolites (e.g., methotrexate, 6-mercaptopurine, 6-thioguanine, cytarabine, 5-fluorouracil decarbazine), alkylating agents (e.g., mechlorethamine, thiotepa chlorambucil, rachelmycin (CC-1065), melphalan, carmustine (BSNU), lomustine (CCNU), cyclophosphamide, busulfan, dibromomannitol, streptozotocin, mitomycin C, and cis-dichlorodiamine platinum (II) (DDP) cisplatin), anthracyclines (e.g., daunorubicin (formerly daunomycin) and doxorubicin), antibiotics (e.g., dactinomycin (formerly actinomycin), bleomycin, mithramycin, and anthramycin (AMC)), and anti-mitotic agents (e.g., vincristine, vinblastine, taxol and maytansinoids).

[0659] In some embodiments, the payload may be a detectable agent, such as various organic small molecules, inorganic compounds, nanoparticles, enzymes or enzyme substrates, fluorescent materials, luminescent materials (e.g., luminol), bioluminescent materials (e.g., luciferase, luciferin, and aequorin), chemiluminescent materials, radioactive materials (e.g., ¹⁸F, ⁶⁷Ga, ^{81m}Kr, ⁸²Rb, ¹¹¹In, ¹²³I, ¹³³Xe, ²⁰¹Tl, ¹²⁵I, ³⁵S, ¹⁴C, ³H, or ^{99m}Tc (e.g., as pertechnetate (technetate(VII), TcO₄⁻)), and contrast agents (e.g., gold (e.g., gold nanoparticles), gadolinium (e.g., chelated Gd), iron oxides (e.g., superparamagnetic iron oxide (SPIO), monocrystalline iron oxide nanoparticles (MIONs), and ultrasmall superparamagnetic iron oxide (USPIO)), manganese chelates (e.g., Mn-DPDP), barium sulfate, iodinated contrast media (iohexol), microbubbles, or perfluorocarbons). Such optically-detectable labels include for example, without limitation, 4-acetamido-4′-isothiocyanatostilbene-2,2′disulfonic acid; acridine and derivatives (e.g., acridine and acridine isothiocyanate); 5-(2′-aminoethyl)aminonaphthalene-1-sulfonic acid (EDANS); 4-amino-N-[3-vinylsulfonyl)phenyl]naphthalimide-3,5 disulfonate; N-(4-anilino-1-naphthyl)maleimide; anthranilamide; BODIPY; Brilliant Yellow; coumarin and derivatives (e.g., coumarin, 7-amino-4-methylcoumarin (AMC, Coumarin 120), and 7-amino-4-trifluoromethylcoumarin (Coumarin 151)); cyanine dyes; cyanosine; 4′,6-diaminidino-2-phenylindole (DAPI); 5′ 5″-dibromopyrogallol-sulfonaphthalein (Bromopyrogallol Red); 7-diethylamino-3-(4′-isothiocyanatophenyl)-4-methylcoumarin; diethylenetriamine pentaacetate; 4,4′-diisothiocyanatodihydro-stilbene-2,2′-disulfonic acid; 4,4′-diisothiocyanatostilbene-2,2′-disulfonic acid; 5-[dimethylamino]-naphthalene-1-sulfonyl chloride (DNS, dansylchloride); 4-dimethylaminophenylazophenyl-4′-isothiocyanate (DABITC); eosin and derivatives (e.g., eosin and eosin isothiocyanate); erythrosin and derivatives (e.g., erythrosin B and erythrosin isothiocyanate); ethidium; fluorescein and derivatives (e.g., 5-carboxyfluorescein (FAM), 5-(4,6-dichlorotriazin-2-yl)aminofluorescein (DTAF), 2′,7′-dimethoxy-4′5′-dichloro-6-carboxyfluorescein, fluorescein, fluorescein isothiocyanate, X-rhodamine-5-(and-6)-isothiocyanate (QFITC or XRITC), and fluorescamine); 2-[2-[3-[[1,3-dihydro-1,1-dimethyl-3-(3-sulfopropyl)-2H-benz[e]indol-2-ylidene]ethylidene]-2-[4-(ethoxycarbonyl)-1-piperazinyl]-1-cyclopenten-1-yl]ethenyl]-1,1-dimethyl-3-(3-sulforpropyl)-1H-benz[e]indolium hydroxide, inner salt, compound with n,n-diethylethanamine(1:1) (IR144); 5-chloro-2-[2-[3-[(5-chloro-3-ethyl-2(3H)-benzothiazol-ylidene)ethylidene]-2-(diphenylamino)-1-cyclopenten-1-yl]ethenyl]-3-ethyl benzothiazolium perchlorate (IR140); Malachite Green isothiocyanate; 4-methylumbelliferone orthocresolphthalein; nitrotyrosine; pararosaniline; Phenol Red; B-phycoerythrin; o-phthaldialdehyde; pyrene and derivatives (e.g., pyrene, pyrene butyrate, and succinimidyl 1-pyrene); butyrate quantum dots; Reactive Red 4 (Cibacron™ Brilliant Red 3B-A); rhodamine and derivatives (e.g., 6-carboxy-X-rhodamine (ROX), 6-carboxyrhodamine (R6G), lissamine rhodamine B sulfonyl chloride rhodarnine (Rhod), rhodamine B, rhodamine 123, rhodamine X isothiocyanate, sulforhodamine B, sulforhodamine 101, sulfonyl chloride derivative of sulforhodamine 101 (Texas Red), N,N,N′,N′tetramethyl-6-carboxyrhodamine (TAMRA) tetramethyl rhodamine, and tetramethyl rhodamine isothiocyanate (TRITC)); riboflavin; rosolic acid; terbium chelate derivatives; Cyanine-3 (Cy3); Cyanine-5 (Cy5); cyanine-5.5 (Cy5.5), Cyanine-7 (Cy7); IRD 700; IRD 800; Alexa 647; La Jolta Blue; phthalo cyanine; and naphthalo cyanine.

[0660] In some embodiments, the detectable agent may be a non-detectable pre-cursor that becomes detectable upon activation (e.g., fluorogenic tetrazine-fluorophore constructs (e.g., tetrazine-BODIPY FL, tetrazine-Oregon Green 488, or tetrazine-BODIPY TMR-X) or enzyme activatable fluorogenic agents (e.g., PROSENSE® (VisEn Medical))). In vitro assays in which the enzyme labeled compositions can be used include, but are not limited to, enzyme linked immunosorbent assays (ELISAs), immunoprecipitation assays, immunofluorescence, enzyme immunoassays (EIA), radioimmunoassays (RIA), and Western blot analysis.Combination

[0661] The modified nucleic acids, enhanced modified RNA or ribonucleic acids may be used in combination with one or more other therapeutic, prophylactic, diagnostic, or imaging agents. By “in combination with,” it is not intended to imply that the agents must be administered at the same time and/or formulated for delivery together, although these methods of delivery are within the scope of the present disclosure. Compositions can be administered concurrently with, prior to, or subsequent to, one or more other desired therapeutics or medical procedures. In general, each agent will be administered at a dose and/or on a time schedule determined for that agent. In some embodiments, the present disclosure encompasses the delivery of pharmaceutical, prophylactic, diagnostic, or imaging compositions in combination with agents that may improve their bioavailability, reduce and/or modify their metabolism, inhibit their excretion, and/or modify their distribution within the body. As a non-limiting example, the modified nucleic acids, enhanced modified RNA or ribonucleic acids may be used in combination with a pharmaceutical agent for the treatment of cancer or to control hyperproliferative cells. In U.S. Pat. No. 7,964,571, herein incorporated by reference in its entirety, a combination therapy for the treatment of solid primary or metastasized tumor is described using a pharmaceutical composition including a DNA plasmid encoding for interleukin-12 with a lipopolymer and also administering at least one anticancer agent or chemotherapeutic. Further, the modified nucleic acids, enhanced modified RNA or ribonucleic acids of the present invention that encodes anti-proliferative molecules may be in a pharmaceutical composition with a lipopolymer (see e.g., U.S. Pub. No. 20110218231, herein incorporated by reference in its entirety, claiming a pharmaceutical composition comprising a DNA plasmid encoding an anti-proliferative molecule and a lipopolymer) which may be administered with at least one chemotherapeutic or anticancer agent.

### Payload Administration: Cell Penetrating Payload

[0662] In some embodiments, the polynucleotides, modified nucleotides and modified nucleic acid molecules, which are incorporated into a nucleic acid, e.g., RNA or mRNA, can also include a payload that can be a cell penetrating moiety or agent that enhances intracellular delivery of the compositions. For example, the compositions can include, but are not limited to, a cell-penetrating peptide sequence that facilitates delivery to the intracellular space, e.g., HIV-derived TAT peptide, penetratins, transportans, or hCT derived cell-penetrating peptides, see, e.g., Caron et al., (2001) Mol Ther. 3(3):310-8; Langel, Cell-Penetrating Peptides: Processes and Applications (CRC Press, Boca Raton FL 2002); El-Andaloussi et al., (2005) Curr Pharm Des. 11(28):3597-611; and Deshayes et al., (2005) Cell Mol Life Sci. 62(16):1839-49; all of which are incorporated herein by reference. The compositions can also be formulated to include a cell penetrating agent, e.g., liposomes, which enhance delivery of the compositions to the intracellular space.

### Payload Administration: Biological Target

[0663] The modified nucleotides and modified nucleic acid molecules described herein, which are incorporated into a nucleic acid, e.g., RNA or mRNA, can be used to deliver a payload to any biological target for which a specific ligand exists or can be generated. The ligand can bind to the biological target either covalently or non-covalently.

[0664] Examples of biological targets include, but are not limited to, biopolymers, e.g., antibodies, nucleic acids such as RNA and DNA, proteins, enzymes; examples of proteins include, but are not limited to, enzymes, receptors, and ion channels. In some embodiments the target may be a tissue- or a cell-type specific marker, e.g., a protein that is expressed specifically on a selected tissue or cell type. In some embodiments, the target may be a receptor, such as, but not limited to, plasma membrane receptors and nuclear receptors; more specific examples include, but are not limited to, G-protein-coupled receptors, cell pore proteins, transporter proteins, surface-expressed antibodies, HLA proteins, MHC proteins and growth factor receptors.

### Dosing

[0665] The present invention provides methods comprising administering modified mRNAs and their encoded proteins or complexes in accordance with the invention to a subject in need thereof. Nucleic acids, proteins or complexes, or pharmaceutical, imaging, diagnostic, or prophylactic compositions thereof, may be administered to a subject using any amount and any route of administration effective for preventing, treating, diagnosing, or imaging a disease, disorder, and/or condition (e.g., a disease, disorder, and/or condition relating to working memory deficits). The exact amount required will vary from subject to subject, depending on the species, age, and general condition of the subject, the severity of the disease, the particular composition, its mode of administration, its mode of activity, and the like. Compositions in accordance with the invention are typically formulated in dosage unit form for ease of administration and uniformity of dosage. It will be understood, however, that the total daily usage of the compositions of the present invention may be decided by the attending physician within the scope of sound medical judgment. The specific therapeutically effective, prophylactically effective, or appropriate imaging dose level for any particular patient will depend upon a variety of factors including the disorder being treated and the severity of the disorder; the activity of the specific compound employed; the specific composition employed; the age, body weight, general health, sex and diet of the patient; the time of administration, route of administration, and rate of excretion of the specific compound employed; the duration of the treatment; drugs used in combination or coincidental with the specific compound employed; and like factors well known in the medical arts.

[0666] In certain embodiments, compositions in accordance with the present invention may be administered at dosage levels sufficient to deliver from about 0.0001 mg/kg to about 100 mg/kg, from about 0.001 mg/kg to about 0.05 mg/kg, from about 0.005 mg/kg to about 0.05 mg/kg, from about 0.001 mg/kg to about 0.005 mg/kg, from about 0.05 mg/kg to about 0.5 mg/kg, from about 0.01 mg/kg to about 50 mg/kg, from about 0.1 mg/kg to about 40 mg/kg, from about 0.5 mg/kg to about 30 mg/kg, from about 0.01 mg/kg to about 10 mg/kg, from about 0.1 mg/kg to about 10 mg/kg, or from about 1 mg/kg to about 25 mg/kg, of subject body weight per day, one or more times a day, to obtain the desired therapeutic, diagnostic, prophylactic, or imaging effect. The desired dosage may be delivered three times a day, two times a day, once a day, every other day, every third day, every week, every two weeks, every three weeks, or every four weeks. In certain embodiments, the desired dosage may be delivered using multiple administrations (e.g., two, three, four, five, six, seven, eight, nine, ten, eleven, twelve, thirteen, fourteen, or more administrations).

[0667] According to the present invention, it has been discovered that administration of modified nucleic acids, enhanced modified RNA or ribonucleic acids in split-dose regimens produce higher levels of proteins in mammalian subjects. As used herein, a “split dose” is the division of single unit dose or total daily dose into two or more doses, e.g, two or more administrations of the single unit dose. As used herein, a “single unit dose” is a dose of any therapeutic administer in one dose/at one time/single route/single point of contact, i.e., single administration event. As used herein, a “total daily dose” is an amount given or prescribed in 24 hr period. It may be administered as a single unit dose. In one embodiment, the modified nucleic acids, enhanced modified RNA or ribonucleic acids of the present invention are administer to a subject in split doses. The modified nucleic acids, enhanced modified RNA or ribonucleic acids may be formulated in buffer only or in a formulation described herein.

### Dosage Forms

[0668] A pharmaceutical composition described herein can be formulated into a dosage form described herein, such as a topical, intranasal, intratracheal, or injectable (e.g., intravenous, intraocular, intravitreal, intramuscular, intracardiac, intraperitoneal, subcutaneous).

### Liquid Dosage Forms

[0669] Liquid dosage forms for parenteral administration include, but are not limited to, pharmaceutically acceptable emulsions, microemulsions, solutions, suspensions, syrups, and/or elixirs. In addition to active ingredients, liquid dosage forms may comprise inert diluents commonly used in the art including, but not limited to, water or other solvents, solubilizing agents and emulsifiers such as ethyl alcohol, isopropyl alcohol, ethyl carbonate, ethyl acetate, benzyl alcohol, benzyl benzoate, propylene glycol, 1,3-butylene glycol, dimethylformamide, oils (in particular, cottonseed, groundnut, corn, germ, olive, castor, and sesame oils), glycerol, tetrahydrofurfuryl alcohol, polyethylene glycols and fatty acid esters of sorbitan, and mixtures thereof. In certain embodiments for parenteral administration, compositions may be mixed with solubilizing agents such as CREMOPHOR®, alcohols, oils, modified oils, glycols, polysorbates, cyclodextrins, polymers, and/or combinations thereof.

### Injectable

[0670] Injectable preparations, for example, sterile injectable aqueous or oleaginous suspensions may be formulated according to the known art and may include suitable dispersing agents, wetting agents, and/or suspending agents. Sterile injectable preparations may be sterile injectable solutions, suspensions, and/or emulsions in nontoxic parenterally acceptable diluents and/or solvents, for example, a solution in 1,3-butanediol. Among the acceptable vehicles and solvents that may be employed include, but are not limited to, are water, Ringer's solution, U.S.P., and isotonic sodium chloride solution. Sterile, fixed oils are conventionally employed as a solvent or suspending medium. For this purpose any bland fixed oil can be employed including synthetic mono- or diglycerides. Fatty acids such as oleic acid can be used in the preparation of injectables.

[0671] Injectable formulations can be sterilized, for example, by filtration through a bacterial-retaining filter, and/or by incorporating sterilizing agents in the form of sterile solid compositions which can be dissolved or dispersed in sterile water or other sterile injectable medium prior to use.

[0672] In order to prolong the effect of an active ingredient, it may be desirable to slow the absorption of the active ingredient from subcutaneous or intramuscular injection. This may be accomplished by the use of a liquid suspension of crystalline or amorphous material with poor water solubility. The rate of absorption of modified mRNA then depends upon its rate of dissolution which, in turn, may depend upon crystal size and crystalline form. Alternatively, delayed absorption of a parenterally administered modified mRNA may be accomplished by dissolving or suspending the modified mRNA in an oil vehicle. Injectable depot forms are made by forming microencapsule matrices of the modified mRNA in biodegradable polymers such as polylactide-polyglycolide. Depending upon the ratio of modified mRNA to polymer and the nature of the particular polymer employed, the rate of modified mRNA release can be controlled. Examples of other biodegradable polymers include, but are not limited to, poly(orthoesters) and poly(anhydrides). Depot injectable formulations may be prepared by entrapping the modified mRNA in liposomes or microemulsions which are compatible with body tissues.

### Pulmonary

[0673] Formulations described herein as being useful for pulmonary delivery may also be use for intranasal delivery of a pharmaceutical composition. Another formulation suitable for intranasal administration may be a coarse powder comprising the active ingredient and having an average particle from about 0.2 μm to 500 μm. Such a formulation may be administered in the manner in which snuff is taken, i.e. by rapid inhalation through the nasal passage from a container of the powder held close to the nose.

[0674] Formulations suitable for nasal administration may, for example, comprise from about as little as 0.1% (w/w) and as much as 100% (w/w) of active ingredient, and may comprise one or more of the additional ingredients described herein. A pharmaceutical composition may be prepared, packaged, and/or sold in a formulation suitable for buccal administration. Such formulations may, for example, be in the form of tablets and/or lozenges made using conventional methods, and may, for example, contain about 0.1% to 20% (w/w) active ingredient, where the balance may comprise an orally dissolvable and/or degradable composition and, optionally, one or more of the additional ingredients described herein. Alternately, formulations suitable for buccal administration may comprise a powder and/or an aerosolized and/or atomized solution and/or suspension comprising active ingredient. Such powdered, aerosolized, and/or aerosolized formulations, when dispersed, may have an average particle and/or droplet size in the range from about 0.1 nm to about 200 nm, and may further comprise one or more of any additional ingredients described herein.

[0675] General considerations in the formulation and/or manufacture of pharmaceutical agents may be found, for example, in Remington: The Science and Practice of Pharmacy 21^{st} ed., Lippincott Williams & Wilkins, 2005 (incorporated herein by reference in its entirety).

### Coatings or Shells

[0676] Solid dosage forms of tablets, dragees, capsules, pills, and granules can be prepared with coatings and shells such as enteric coatings and other coatings well known in the pharmaceutical formulating art. They may optionally comprise opacifying agents and can be of a composition that they release the active ingredient(s) only, or preferentially, in a certain part of the intestinal tract, optionally, in a delayed manner. Examples of embedding compositions which can be used include polymeric substances and waxes. Solid compositions of a similar type may be employed as fillers in soft and hard-filled gelatin capsules using such excipients as lactose or milk sugar as well as high molecular weight polyethylene glycols and the like.

### Kits

[0677] The invention provides a variety of kits for conveniently and/or effectively carrying out methods of the present invention. Typically kits will comprise sufficient amounts and/or numbers of components to allow a user to perform multiple treatments of a subject(s) and/or to perform multiple experiments.

[0678] In one aspect, the present invention provides kits for protein production, comprising a first modified nucleic acids, enhanced modified RNA or ribonucleic acids comprising a translatable region. The kit may further comprise packaging and instructions and/or a delivery agent to form a formulation composition. The delivery agent may comprise a saline, a buffered solution, a lipidoid or any delivery agent disclosed herein.

[0679] In one embodiment, the buffer solution may include sodium chloride, calcium chloride, phosphate and/or EDTA. In another embodiment, the buffer solution may include, but is not limited to, saline, saline with 2 mM calcium, 5% sucrose, 5% sucrose with 2 mM calcium, 5% Mannitol, 5% Mannitol with 2 mM calcium, Ringer's lactate, sodium chloride, sodium chloride with 2 mM calcium. In a further embodiment, the buffer solutions may be precipitated or it may be lyophilized. The amount of each component may be varied to enable consistent, reproducible higher concentration saline or simple buffer formulations. The components may also be varied in order to increase the stability of modified RNA in the buffer solution over a period of time and/or under a variety of conditions.

[0680] In one aspect, the present invention provides kits for protein production, comprising: a modified nucleic acids, enhanced modified RNA or ribonucleic acids comprising a translatable region, provided in an amount effective to produce a desired amount of a protein encoded by the translatable region when introduced into a target cell; a second modified nucleic acids, enhanced modified RNA or ribonucleic acids comprising an inhibitory nucleic acid, provided in an amount effective to substantially inhibit the innate immune response of the cell; and packaging and instructions.

[0681] In one aspect, the present invention provides kits for protein production, comprising a modified nucleic acids, enhanced modified RNA or ribonucleic acids comprising a translatable region, wherein the nucleic acid exhibits reduced degradation by a cellular nuclease, and packaging and instructions.

[0682] In one aspect, the present invention provides kits for protein production, comprising a modified nucleic acids, enhanced modified RNA or ribonucleic acids comprising a translatable region, wherein the nucleic acid exhibits reduced degradation by a cellular nuclease, and a mammalian cell suitable for translation of the translatable region of the first nucleic acid

### Devices

[0683] The present invention provides for devices which may incorporate modified nucleic acids, enhanced modified RNA or ribonucleic acids that encode polypeptides of interest. These devices contain in a stable formulation the reagents to synthesize a nucleic acid in a formulation available to be immediately delivered to a subject in need thereof, such as a human patient. Non-limiting examples of such a polypeptide of interest include a growth factor and/or angiogenesis stimulator for wound healing, a peptide antibiotic to facilitate infection control, and an antigen to rapidly stimulate an immune response to a newly identified virus.

[0684] In some embodiments the device is self-contained, and is optionally capable of wireless remote access to obtain instructions for synthesis and/or analysis of the generated modified nucleic acids, enhanced modified RNA or ribonucleic acids. The device is capable of mobile synthesis of at least one modified nucleic acids, enhanced modified RNA or ribonucleic acids and preferably an unlimited number of different modified nucleic acids, enhanced modified RNA or ribonucleic acids. In certain embodiments, the device is capable of being transported by one or a small number of individuals. In other embodiments, the device is scaled to fit on a benchtop or desk. In other embodiments, the device is scaled to fit into a suitcase, backpack or similarly sized object. In another embodiment, the device may be a point of care or handheld device. In further embodiments, the device is scaled to fit into a vehicle, such as a car, truck or ambulance, or a military vehicle such as a tank or personnel carrier. The information necessary to generate a ribonucleic acid encoding polypeptide of interest is present within a computer readable medium present in the device.

[0685] In one embodiment, a device may be used to assess levels of a protein which has been administered in the form of a modified nucleic acids, enhanced modified RNA or ribonucleic acids. The device may comprise a blood, urine or other biofluidic test.

[0686] In some embodiments, the device is capable of communication (e.g., wireless communication) with a database of nucleic acid and polypeptide sequences. The device contains at least one sample block for insertion of one or more sample vessels. Such sample vessels are capable of accepting in liquid or other form any number of materials such as template DNA, nucleotides, enzymes, buffers, and other reagents. The sample vessels are also capable of being heated and cooled by contact with the sample block. The sample block is generally in communication with a device base with one or more electronic control units for the at least one sample block. The sample block preferably contains a heating module, such heating molecule capable of heating and/or cooling the sample vessels and contents thereof to temperatures between about −20 C and above +100 C. The device base is in communication with a voltage supply such as a battery or external voltage supply. The device also contains means for storing and distributing the materials for RNA synthesis.

[0687] Optionally, the sample block contains a module for separating the synthesized nucleic acids. Alternatively, the device contains a separation module operably linked to the sample block. Preferably the device contains a means for analysis of the synthesized nucleic acid. Such analysis includes sequence identity (demonstrated such as by hybridization), absence of non-desired sequences, measurement of integrity of synthesized mRNA (such has by microfluidic viscometry combined with spectrophotometry), and concentration and/or potency of modified nucleic acids, enhanced modified RNA or ribonucleic acids (such as by spectrophotometry).

[0688] In certain embodiments, the device is combined with a means for detection of pathogens present in a biological material obtained from a subject, e.g., the IBIS PLEX-ID system (Abbott, Abbott Park, IL) for microbial identification.

[0689] Suitable devices for use in delivering intradermal pharmaceutical compositions described herein include short needle devices such as those described in U.S. Pat. Nos. 4,886,499; 5,190,521; 5,328,483; 5,527,288; 4,270,537; 5,015,235; 5,141,496; and 5,417,662. Intradermal compositions may be administered by devices which limit the effective penetration length of a needle into the skin, such as those described in PCT publication WO 99/34850 and functional equivalents thereof. Jet injection devices which deliver liquid compositions to the dermis via a liquid jet injector and/or via a needle which pierces the stratum corneum and produces a jet which reaches the dermis are suitable. Jet injection devices are described, for example, in U.S. Pat. Nos. 5,480,381; 5,599,302; 5,334,144; 5,993,412; 5,649,912; 5,569,189; 5,704,911; 5,383,851; 5,893,397; 5,466,220; 5,339,163; 5,312,335; 5,503,627; 5,064,413; 5,520,639; 4,596,556; 4,790,824; 4,941,880; 4,940,460; and PCT publications WO 97/37705 and WO 97/13537. Ballistic powder/particle delivery devices which use compressed gas to accelerate vaccine in powder form through the outer layers of the skin to the dermis are suitable.

[0690] Alternatively or additionally, conventional syringes may be used in the classical mantoux method of intradermal administration.

[0691] In some embodiments, the device may be a pump or comprise a catheter for administration of compounds or compositions of the invention across the blood brain barrier. Such devices include but are not limited to a pressurized olfactory delivery device, iontophoresis devices, multi-layered microfluidic devices, and the like. Such devices may be portable or stationary. They may be implantable or externally tethered to the body or combinations thereof.

[0692] Devices for administration may be employed to deliver the modified nucleic acids, enhanced modified RNA or ribonucleic acids of the present invention according to single, multi- or split-dosing regimens taught herein. Such devices are described below.

[0693] Method and devices known in the art for multi-administration to cells, organs and tissues are contemplated for use in conjunction with the methods and compositions disclosed herein as embodiments of the present invention. These include, for example, those methods and devices having multiple needles, hybrid devices employing for example lumens or catheters as well as devices utilizing heat, electric current or radiation driven mechanisms.

[0694] According to the present invention, these multi-administration devices may be utilized to deliver the single, multi- or split doses contemplated herein.

[0695] A method for delivering therapeutic agents to a solid tissue has been described by Bahrami et al. and is taught for example in US Patent Publication 20110230839, the contents of which are incorporated herein by reference in their entirety. According to Bahrami, an array of needles is incorporated into a device which delivers a substantially equal amount of fluid at any location in said solid tissue along each needle's length.

[0696] A device for delivery of biological material across the biological tissue has been described by Kodgule et al. and is taught for example in US Patent Publication 20110172610, the contents of which are incorporated herein by reference in their entirety. According to Kodgule, multiple hollow micro-needles made of one or more metals and having outer diameters from about 200 microns to about 350 microns and lengths of at least 100 microns are incorporated into the device which delivers peptides, proteins, carbohydrates, nucleic acid molecules, lipids and other pharmaceutically active ingredients or combinations thereof.

[0697] A delivery probe for delivering a therapeutic agent to a tissue has been described by Gunday et al. and is taught for example in US Patent Publication 20110270184, the contents of which are incorporated herein by reference in their entirety. According to Gunday, multiple needles are incorporated into the device which moves the attached capsules between an activated position and an inactivated position to force the agent out of the capsules through the needles.

[0698] A multiple-injection medical apparatus has been described by Assaf and is taught for example in US Patent Publication 20110218497, the contents of which are incorporated herein by reference in their entirety. According to Assaf, multiple needles are incorporated into the device which has a chamber connected to one or more of said needles and a means for continuously refilling the chamber with the medical fluid after each injection.

[0699] In one embodiment, the modified nucleic acids, enhanced modified RNA or ribonucleic acids are administered subcutaneously or intramuscularly via at least 3 needles to three different, optionally adjacent, sites simultaneously, or within a 60 minutes period (e.g., administration to 4, 5, 6, 7, 8, 9, or 10 sites simultaneously or within a 60 minute period). The split doses can be administered simultaneously to adjacent tissue using the devices described in U.S. Patent Publication Nos. 20110230839 and 20110218497, each of which is incorporated herein by reference.

[0700] An at least partially implantable system for injecting a substance into a patient's body, in particular a penis erection stimulation system has been described by Forsell and is taught for example in US Patent Publication 20110196198, the contents of which are incorporated herein by reference in their entirety. According to Forsell, multiple needles are incorporated into the device which is implanted along with one or more housings adjacent the patient's left and right corpora cavernosa. A reservoir and a pump are also implanted to supply drugs through the needles.

[0701] A method for the transdermal delivery of a therapeutic effective amount of iron has been described by Berenson and is taught for example in US Patent Publication 20100130910, the contents of which are incorporated herein by reference in their entirety. According to Berenson, multiple needles may be used to create multiple micro channels in stratum corneum to enhance transdermal delivery of the ionic iron on an iontophoretic patch.

[0702] A method for delivery of biological material across the biological tissue has been described by Kodgule et al and is taught for example in US Patent Publication 20110196308, the contents of which are incorporated herein by reference in their entirety. According to Kodgule, multiple biodegradable microneedles containing a therapeutic active ingredient are incorporated in a device which delivers proteins, carbohydrates, nucleic acid molecules, lipids and other pharmaceutically active ingredients or combinations thereof.

[0703] A transdermal patch comprising a botulinum toxin composition has been described by Donovan and is taught for example in US Patent Publication 20080220020, the contents of which are incorporated herein by reference in their entirety. According to Donovan, multiple needles are incorporated into the patch which delivers botulinum toxin under stratum corneum through said needles which project through the stratum corneum of the skin without rupturing a blood vessel.

[0704] A small, disposable drug reservoir, or patch pump, which can hold approximately 0.2 to 15 mL of liquid formulations can be placed on the skin and deliver the formulation continuously subcutaneously using a small bore needed (e.g., 26 to 34 gauge). As non-limiting examples, the patch pump may be 50 mm by 76 mm by 20 mm spring loaded having a 30 to 34 gauge needle (BD™ Microinfuser, Franklin Lakes NJ), 41 mm by 62 mm by 17 mm with a 2 mL reservoir used for drug delivery such as insulin (OMNIPOD®, Insulet Corporation Bedford, MA), or 43-60 mm diameter, 10 mm thick with a 0.5 to 10 mL reservoir (PATCHPUMP®, SteadyMed Therapeutics, San Francisco, CA). Further, the patch pump may be battery powered and/or rechargeable.

[0705] A cryoprobe for administration of an active agent to a location of cryogenic treatment has been described by Toubia and is taught for example in US Patent Publication 20080140061, the contents of which are incorporated herein by reference in their entirety. According to Toubia, multiple needles are incorporated into the probe which receives the active agent into a chamber and administers the agent to the tissue.

[0706] A method for treating or preventing inflammation or promoting healthy joints has been described by Stock et al and is taught for example in US Patent Publication 20090155186, the contents of which are incorporated herein by reference in their entirety. According to Stock, multiple needles are incorporated in a device which administers compositions containing signal transduction modulator compounds.

[0707] A multi-site injection system has been described by Kimmell et al. and is taught for example in US Patent Publication 20100256594, the contents of which are incorporated herein by reference in their entirety. According to Kimmell, multiple needles are incorporated into a device which delivers a medication into a stratum corneum through the needles.

[0708] A method for delivering interferons to the intradermal compartment has been described by Dekker et al. and is taught for example in US Patent Publication 20050181033, the contents of which are incorporated herein by reference in their entirety. According to Dekker, multiple needles having an outlet with an exposed height between 0 and 1 mm are incorporated into a device which improves pharmacokinetics and bioavailability by delivering the substance at a depth between 0.3 mm and 2 mm.

[0709] A method for delivering genes, enzymes and biological agents to tissue cells has described by Desai and is taught for example in US Patent Publication 20030073908, the contents of which are incorporated herein by reference in their entirety. According to Desai, multiple needles are incorporated into a device which is inserted into a body and delivers a medication fluid through said needles.

[0710] A method for treating cardiac arrhythmias with fibroblast cells has been described by Lee et al and is taught for example in US Patent Publication 20040005295, the contents of which are incorporated herein by reference in their entirety. According to Lee, multiple needles are incorporated into the device which delivers fibroblast cells into the local region of the tissue.

[0711] A method using a magnetically controlled pump for treating a brain tumor has been described by Shachar et al. and is taught for example in U.S. Pat. No. 7,799,012 (method) and U.S. Pat. No. 7,799,016 (device), the contents of which are incorporated herein by reference in their entirety. According Shachar, multiple needles were incorporated into the pump which pushes a medicating agent through the needles at a controlled rate.

[0712] Methods of treating functional disorders of the bladder in mammalian females have been described by Versi et al. and are taught for example in U.S. Pat. No. 8,029,496, the contents of which are incorporated herein by reference in their entirety. According to Versi, an array of micro-needles is incorporated into a device which delivers a therapeutic agent through the needles directly into the trigone of the bladder.

[0713] A micro-needle transdermal transport device has been described by Angel et al and is taught for example in U.S. Pat. No. 7,364,568, the contents of which are incorporated herein by reference in their entirety. According to Angel, multiple needles are incorporated into the device which transports a substance into a body surface through the needles which are inserted into the surface from different directions. The micro-needle transdermal transport device may be a solid micro-needle system or a hollow micro-needle system. As a non-limiting example, the solid micro-needle system may have up to a 0.5 mg capacity, with 300-1500 solid micro-needles per cm² about 150-700 pm tall coated with a drug. The micro-needles penetrate the stratum corneum and remain in the skin for short duration (e.g., 20 seconds to 15 minutes). In another example, the hollow micro-needle system has up to a 3 mL capacity to deliver liquid formulations using 15-20 microneedles per cm2 being approximately 950 pm tall. The micro-needles penetrate the skin to allow the liquid formulations to flow from the device into the skin. The hollow micro-needle system may be worn from 1 to 30 minutes depending on the formulation volume and viscosity.

[0714] A device for subcutaneous infusion has been described by Dalton et al and is taught for example in U.S. Pat. No. 7,150,726, the contents of which are incorporated herein by reference in their entirety. According to Dalton, multiple needles are incorporated into the device which delivers fluid through the needles into a subcutaneous tissue.

[0715] A device and a method for intradermal delivery of vaccines and gene therapeutic agents through microcannula have been described by Mikszta et al. and are taught for example in U.S. Pat. No. 7,473,247, the contents of which are incorporated herein by reference in their entirety. According to Mitszta, at least one hollow micro-needle is incorporated into the device which delivers the vaccines to the subject's skin to a depth of between 0.025 mm and 2 mm.

[0716] A method of delivering insulin has been described by Pettis et al and is taught for example in U.S. Pat. No. 7,722,595, the contents of which are incorporated herein by reference in their entirety. According to Pettis, two needles are incorporated into a device wherein both needles insert essentially simultaneously into the skin with the first at a depth of less than 2.5 mm to deliver insulin to intradermal compartment and the second at a depth of greater than 2.5 mm and less than 5.0 mm to deliver insulin to subcutaneous compartment.

[0717] Cutaneous injection delivery under suction has been described by Kochamba et al. and is taught for example in U.S. Pat. No. 6,896,666, the contents of which are incorporated herein by reference in their entirety. According to Kochamba, multiple needles in relative adjacency with each other are incorporated into a device which injects a fluid below the cutaneous layer.

[0718] A device for withdrawing or delivering a substance through the skin has been described by Down et al and is taught for example in U.S. Pat. No. 6,607,513, the contents of which are incorporated herein by reference in their entirety. According to Down, multiple skin penetrating members which are incorporated into the device have lengths of about 100 microns to about 2000 microns and are about 30 to 50 gauge.

[0719] A device for delivering a substance to the skin has been described by Palmer et al and is taught for example in U.S. Pat. No. 6,537,242, the contents of which are incorporated herein by reference in their entirety. According to Palmer, an array of micro-needles is incorporated into the device which uses a stretching assembly to enhance the contact of the needles with the skin and provides a more uniform delivery of the substance.

[0720] A perfusion device for localized drug delivery has been described by Zamoyski and is taught for example in U.S. Pat. No. 6,468,247, the contents of which are incorporated herein by reference in their entirety. According to Zamoyski, multiple hypodermic needles are incorporated into the device which injects the contents of the hypodermics into a tissue as said hypodermics are being retracted.

[0721] A method for enhanced transport of drugs and biological molecules across tissue by improving the interaction between micro-needles and human skin has been described by Prausnitz et al. and is taught for example in U.S. Pat. No. 6,743,211, the contents of which are incorporated herein by reference in their entirety. According to Prausnitz, multiple micro-needles are incorporated into a device which is able to present a more rigid and less deformable surface to which the micro-needles are applied.

[0722] A device for intraorgan administration of medicinal agents has been described by Ting et al and is taught for example in U.S. Pat. No. 6,077,251, the contents of which are incorporated herein by reference in their entirety. According to Ting, multiple needles having side openings for enhanced administration are incorporated into a device which by extending and retracting said needles from and into the needle chamber forces a medicinal agent from a reservoir into said needles and injects said medicinal agent into a target organ.

[0723] A multiple needle holder and a subcutaneous multiple channel infusion port has been described by Brown and is taught for example in U.S. Pat. No. 4,695,273, the contents of which are incorporated herein by reference in their entirety. According to Brown, multiple needles on the needle holder are inserted through the septum of the infusion port and communicate with isolated chambers in said infusion port.

[0724] A dual hypodermic syringe has been described by Horn and is taught for example in U.S. Pat. No. 3,552,394, the contents of which are incorporated herein by reference in their entirety. According to Horn, two needles incorporated into the device are spaced apart less than 68 mm and may be of different styles and lengths, thus enabling injections to be made to different depths.

[0725] A syringe with multiple needles and multiple fluid compartments has been described by Hershberg and is taught for example in U.S. Pat. No. 3,572,336, the contents of which are incorporated herein by reference in their entirety. According to Hershberg, multiple needles are incorporated into the syringe which has multiple fluid compartments and is capable of simultaneously administering incompatible drugs which are not able to be mixed for one injection.

[0726] A surgical instrument for intradermal injection of fluids has been described by Eliscu et al. and is taught for example in U.S. Pat. No. 2,588,623, the contents of which are incorporated herein by reference in their entirety. According to Eliscu, multiple needles are incorporated into the instrument which injects fluids intradermally with a wider disperse.

[0727] An apparatus for simultaneous delivery of a substance to multiple breast milk ducts has been described by Hung and is taught for example in EP 1818017, the contents of which are incorporated herein by reference in their entirety. According to Hung, multiple lumens are incorporated into the device which inserts though the orifices of the ductal networks and delivers a fluid to the ductal networks.

[0728] A catheter for introduction of medications to the tissue of a heart or other organs has been described by Tkebuchava and is taught for example in WO2006138109, the contents of which are incorporated herein by reference in their entirety. According to Tkebuchava, two curved needles are incorporated which enter the organ wall in a flattened trajectory.

[0729] Devices for delivering medical agents have been described by Mckay et al. and are taught for example in WO2006118804, the content of which are incorporated herein by reference in their entirety. According to Mckay, multiple needles with multiple orifices on each needle are incorporated into the devices to facilitate regional delivery to a tissue, such as the interior disc space of a spinal disc.

[0730] A method for directly delivering an immunomodulatory substance into an intradermal space within a mammalian skin has been described by Pettis and is taught for example in WO2004020014, the contents of which are incorporated herein by reference in their entirety. According to Pettis, multiple needles are incorporated into a device which delivers the substance through the needles to a depth between 0.3 mm and 2 mm.

[0731] Methods and devices for administration of substances into at least two compartments in skin for systemic absorption and improved pharmacokinetics have been described by Pettis et al. and are taught for example in WO2003094995, the contents of which are incorporated herein by reference in their entirety. According to Pettis, multiple needles having lengths between about 300 μm and about 5 mm are incorporated into a device which delivers to intradermal and subcutaneous tissue compartments simultaneously.

[0732] A drug delivery device with needles and a roller has been described by Zimmerman et al. and is taught for example in WO2012006259, the contents of which are incorporated herein by reference in their entirety. According to Zimmerman, multiple hollow needles positioned in a roller are incorporated into the device which delivers the content in a reservoir through the needles as the roller rotates.

Methods and Devices Utilizing Catheters and/or Lumens

[0733] Methods and devices using catheters and lumens may be employed to administer the modified nucleic acids, enhanced modified RNA or ribonucleic acids of the present invention on a single, multi- or split dosing schedule. Such methods and devices are described below.

[0734] A catheter-based delivery of skeletal myoblasts to the myocardium of damaged hearts has been described by Jacoby et al and is taught for example in US Patent Publication 20060263338, the contents of which are incorporated herein by reference in their entirety. According to Jacoby, multiple needles are incorporated into the device at least part of which is inserted into a blood vessel and delivers the cell composition through the needles into the localized region of the subject's heart.

[0735] An apparatus for treating asthma using neurotoxin has been described by Deem et al and is taught for example in US Patent Publication 20060225742, the contents of which are incorporated herein by reference in their entirety. According to Deem, multiple needles are incorporated into the device which delivers neurotoxin through the needles into the bronchial tissue.

[0736] A method for administering multiple-component therapies has been described by Nayak and is taught for example in U.S. Pat. No. 7,699,803, the contents of which are incorporated herein by reference in their entirety. According to Nayak, multiple injection cannulas may be incorporated into a device wherein depth slots may be included for controlling the depth at which the therapeutic substance is delivered within the tissue.

[0737] A surgical device for ablating a channel and delivering at least one therapeutic agent into a desired region of the tissue has been described by McIntyre et al and is taught for example in U.S. Pat. No. 8,012,096, the contents of which are incorporated herein by reference in their entirety. According to McIntyre, multiple needles are incorporated into the device which dispenses a therapeutic agent into a region of tissue surrounding the channel and is particularly well suited for transmyocardial revascularization operations.

[0738] Methods of treating functional disorders of the bladder in mammalian females have been described by Versi et al and are taught for example in U.S. Pat. No. 8,029,496, the contents of which are incorporated herein by reference in their entirety. According to Versi, an array of micro-needles is incorporated into a device which delivers a therapeutic agent through the needles directly into the trigone of the bladder.

[0739] A device and a method for delivering fluid into a flexible biological barrier have been described by Yeshurun et al. and are taught for example in U.S. Pat. No. 7,998,119 (device) and U.S. Pat. No. 8,007,466 (method), the contents of which are incorporated herein by reference in their entirety. According to Yeshurun, the micro-needles on the device penetrate and extend into the flexible biological barrier and fluid is injected through the bore of the hollow micro-needles.

[0740] A method for epicardially injecting a substance into an area of tissue of a heart having an epicardial surface and disposed within a torso has been described by Bonner et al and is taught for example in U.S. Pat. No. 7,628,780, the contents of which are incorporated herein by reference in their entirety. According to Bonner, the devices have elongate shafts and distal injection heads for driving needles into tissue and injecting medical agents into the tissue through the needles.

[0741] A device for sealing a puncture has been described by Nielsen et al and is taught for example in U.S. Pat. No. 7,972,358, the contents of which are incorporated herein by reference in their entirety. According to Nielsen, multiple needles are incorporated into the device which delivers a closure agent into the tissue surrounding the puncture tract.

[0742] A method for myogenesis and angiogenesis has been described by Chiu et al. and is taught for example in U.S. Pat. No. 6,551,338, the contents of which are incorporated herein by reference in their entirety. According to Chiu, 5 to 15 needles having a maximum diameter of at least 1.25 mm and a length effective to provide a puncture depth of 6 to 20 mm are incorporated into a device which inserts into proximity with a myocardium and supplies an exogeneous angiogenic or myogenic factor to said myocardium through the conduits which are in at least some of said needles.

[0743] A method for the treatment of prostate tissue has been described by Bolmsj et al. and is taught for example in U.S. Pat. No. 6,524,270, the contents of which are incorporated herein by reference in their entirety. According to Bolmsj, a device comprising a catheter which is inserted through the urethra has at least one hollow tip extendible into the surrounding prostate tissue. An astringent and analgesic medicine is administered through said tip into said prostate tissue.

[0744] A method for infusing fluids to an intraosseous site has been described by Findlay et al. and is taught for example in U.S. Pat. No. 6,761,726, the contents of which are incorporated herein by reference in their entirety. According to Findlay, multiple needles are incorporated into a device which is capable of penetrating a hard shell of material covered by a layer of soft material and delivers a fluid at a predetermined distance below said hard shell of material.

[0745] A device for injecting medications into a vessel wall has been described by Vigil et al. and is taught for example in U.S. Pat. No. 5,713,863, the contents of which are incorporated herein by reference in their entirety. According to Vigil, multiple injectors are mounted on each of the flexible tubes in the device which introduces a medication fluid through a multi-lumen catheter, into said flexible tubes and out of said injectors for infusion into the vessel wall.

[0746] A catheter for delivering therapeutic and/or diagnostic agents to the tissue surrounding a bodily passageway has been described by Faxon et al. and is taught for example in U.S. Pat. No. 5,464,395, the contents of which are incorporated herein by reference in their entirety. According to Faxon, at least one needle cannula is incorporated into the catheter which delivers the desired agents to the tissue through said needles which project outboard of the catheter.

[0747] Balloon catheters for delivering therapeutic agents have been described by Orr and are taught for example in WO2010024871, the contents of which are incorporated herein by reference in their entirety. According to Orr, multiple needles are incorporated into the devices which deliver the therapeutic agents to different depths within the tissue.

### Methods and Devices Utilizing Electrical Current

[0748] Methods and devices utilizing electric current may be employed to deliver the modified nucleic acids, enhanced modified RNA or ribonucleic acids of the present invention according to the single, multi- or split dosing regimens taught herein. Such methods and devices are described below.

[0749] An electro collagen induction therapy device has been described by Marquez and is taught for example in US Patent Publication 20090137945, the contents of which are incorporated herein by reference in their entirety. According to Marquez, multiple needles are incorporated into the device which repeatedly pierce the skin and draw in the skin a portion of the substance which is applied to the skin first.

[0750] An electrokinetic system has been described by Etheredge et al. and is taught for example in US Patent Publication 20070185432, the contents of which are incorporated herein by reference in their entirety. According to Etheredge, micro-needles are incorporated into a device which drives by an electrical current the medication through the needles into the targeted treatment site.

[0751] An iontophoresis device has been described by Matsumura et al. and is taught for example in U.S. Pat. No. 7,437,189, the contents of which are incorporated herein by reference in their entirety. According to Matsumura, multiple needles are incorporated into the device which is capable of delivering ionizable drug into a living body at higher speed or with higher efficiency.

[0752] Intradermal delivery of biologically active agents by needle-free injection and electroporation has been described by Hoffmann et al and is taught for example in U.S. Pat. No. 7,171,264, the contents of which are incorporated herein by reference in their entirety. According to Hoffmann, one or more needle-free injectors are incorporated into an electroporation device and the combination of needle-free injection and electroporation is sufficient to introduce the agent into cells in skin, muscle or mucosa.

[0753] A method for electropermeabilization-mediated intracellular delivery has been described by Lundkvist et al. and is taught for example in U.S. Pat. No. 6,625,486, the contents of which are incorporated herein by reference in their entirety. According to Lundkvist, a pair of needle electrodes is incorporated into a catheter. Said catheter is positioned into a body lumen followed by extending said needle electrodes to penetrate into the tissue surrounding said lumen. Then the device introduces an agent through at least one of said needle electrodes and applies electric field by said pair of needle electrodes to allow said agent pass through the cell membranes into the cells at the treatment site.

[0754] A delivery system for transdermal immunization has been described by Levin et al. and is taught for example in WO2006003659, the contents of which are incorporated herein by reference in their entirety. According to Levin, multiple electrodes are incorporated into the device which applies electrical energy between the electrodes to generate micro channels in the skin to facilitate transdermal delivery.

[0755] A method for delivering RF energy into skin has been described by Schomacker and is taught for example in WO2011163264, the contents of which are incorporated herein by reference in their entirety. According to Schomacker, multiple needles are incorporated into a device which applies vacuum to draw skin into contact with a plate so that needles insert into skin through the holes on the plate and deliver RF energy.

### Definitions

[0756] At various places in the present specification, substituents of compounds of the present disclosure are disclosed in groups or in ranges. It is specifically intended that the present disclosure include each and every individual subcombination of the members of such groups and ranges. For example, the term “C₁₋₆ alkyl” is specifically intended to individually disclose methyl, ethyl, C₃ alkyl, C₄ alkyl, C₅ alkyl, and C₆ alkyl.

[0757] About: As used herein, the term “about” means +/−10% of the recited value.

[0758] Animal: As used herein, the term “animal” refers to any member of the animal kingdom. In some embodiments, “animal” refers to humans at any stage of development. In some embodiments, “animal” refers to non-human animals at any stage of development. In certain embodiments, the non-human animal is a mammal (e.g., a rodent, a mouse, a rat, a rabbit, a monkey, a dog, a cat, a sheep, cattle, a primate, or a pig). In some embodiments, animals include, but are not limited to, mammals, birds, reptiles, amphibians, fish, and worms. In some embodiments, the animal is a transgenic animal, genetically-engineered animal, or a clone.

[0759] Approximately: As used herein, the term “approximately” or “about,” as applied to one or more values of interest, refers to a value that is similar to a stated reference value. In certain embodiments, the term “approximately” or “about” refers to a range of values that fall within 25%, 20%, 19%, 18%, 17%, 16%, 15%, 14%, 13%, 12%, 11%, 10%, 9%, 8%, 7%, 6%, 5%, 4%, 3%, 2%, 1%, or less in either direction (greater than or less than) of the stated reference value unless otherwise stated or otherwise evident from the context (except where such number would exceed 100% of a possible value).

[0760] Associated with: As used herein, the terms “associated with,” “conjugated,” “linked,” “attached,” and “tethered,” when used with respect to two or more moieties, means that the moieties are physically associated or connected with one another, either directly or via one or more additional moieties that serves as a linking agent, to form a structure that is sufficiently stable so that the moieties remain physically associated under the conditions in which the structure is used, e.g., physiological conditions. An “association” need not be strictly through direct covalent chemical bonding. It may also suggest ionic or hydrogen bonding or a hybridization based connectivity sufficiently stable such that the “associated” entities remain physically associated.

[0761] Auxotrophic: As used herein, the term “auxotrophic” refers to mRNA that comprises at least one feature that triggers or induces the degradation or inactivation of the mRNA such that the protein expression is substantially prevented or reduced in a selected tissue or organ.

[0762] Bifunctional: As used herein, the term “bifunctional” refers to any substance, molecule or moiety which is capable of or maintains at least two functions. The functions may effect the same outcome or a different outcome. The structure that produces the function may be the same or different. For example, bifunctional modified RNAs of the present invention may encode a cytotoxic peptide (a first function) while those nucleosides which comprise the encoding RNA are, in and of themselves, cytotoxic (second function). In this example, delivery of the bifunctional modified RNA to a cancer cell would produce not only a peptide or protein molecule which may ameliorate or treat the cancer but would also deliver a cytotoxic payload of nucleosides to the cell should degradation, instead of translation of the modified RNA, occur.

[0763] Biocompatible: As used herein, the term “biocompatible” means compatible with living cells, tissues, organs or systems posing little to no risk of injury, toxicity or rejection by the immune system.

[0764] Biodegradable: As used herein, the term “biodegradable” means capable of being broken down into innocuous products by the action of living things.

[0765] Biologically active: As used herein, the phrase “biologically active” refers to a characteristic of any substance that has activity in a biological system and/or organism. For instance, a substance that, when administered to an organism, has a biological affect on that organism, is considered to be biologically active. In particular embodiments, a nucleic acid molecule of the present invention may be considered biologically active if even a portion of the nucleic acid molecule is biologically active or mimics an activity considered biologically relevant.

[0766] Chemical terms: The following provides the definition of various chemical terms from “acyl” to “thiol.”

[0767] The term “acyl,” as used herein, represents a hydrogen or an alkyl group (e.g., a haloalkyl group), as defined herein, that is attached to the parent molecular group through a carbonyl group, as defined herein, and is exemplified by formyl (i.e., a carboxyaldehyde group), acetyl, propionyl, butanoyl and the like. Exemplary unsubstituted acyl groups include from 1 to 7, from 1 to 11, or from 1 to 21 carbons. In some embodiments, the alkyl group is further substituted with 1, 2, 3, or 4 substituents as described herein.

[0768] The term “acylamino,” as used herein, represents an acyl group, as defined herein, attached to the parent molecular group though an amino group, as defined herein (i.e., —N(R^{N1})—C(O)—R, where R is H or an optionally substituted C₁₋₆, C₁₋₁₀, or C₁₋₂₀ alkyl group and R^{N1} is as defined herein). Exemplary unsubstituted acylamino groups include from 1 to 41 carbons (e.g., from 1 to 7, from 1 to 13, from 1 to 21, from 2 to 7, from 2 to 13, from 2 to 21, or from 2 to 41 carbons). In some embodiments, the alkyl group is further substituted with 1, 2, 3, or 4 substituents as described herein, and/or the amino group is —NH₂ or —NHR^{N1}, wherein R^{N1} is, independently, OH, NO₂, NH₂, NR^{N2}₂, SO₂OR^{N2}, SO₂R^{N2}, SOR^{N2}, alkyl, or aryl, and each R^{N2} can be H, alkyl, or aryl.

[0769] The term “acyloxy,” as used herein, represents an acyl group, as defined herein, attached to the parent molecular group though an oxygen atom (i.e., —O—C(O)—R, where R is H or an optionally substituted C₁₋₆, C₁₋₁₀, or C₁₋₂₀ alkyl group). Exemplary unsubstituted acyloxy groups include from 1 to 21 carbons (e.g., from 1 to 7 or from 1 to 11 carbons). In some embodiments, the alkyl group is further substituted with 1, 2, 3, or 4 substituents as described herein, and/or the amino group is —NH₂ or —NHR^{N1}, wherein R^{N1} is, independently, OH, NO₂, NH₂, NR^{N2}₂, SO₂OR^{N2}, SO₂R^{N2}, SOR^{N2}, alkyl, or aryl, and each R^{N2} can be H, alkyl, or aryl.

[0770] The term “alkaryl,” as used herein, represents an aryl group, as defined herein, attached to the parent molecular group through an alkylene group, as defined herein. Exemplary unsubstituted alkaryl groups are from 7 to 30 carbons (e.g., from 7 to 16 or from 7 to 20 carbons, such as C₁₋₆ alk-C₆₋₁₀ aryl, C₁₋₁₀ alk-C₆₋₁₀ aryl, or C₁₋₂₀ alk-C₆₋₁₀ aryl). In some embodiments, the alkylene and the aryl each can be further substituted with 1, 2, 3, or 4 substituent groups as defined herein for the respective groups. Other groups preceded by the prefix “alk-” are defined in the same manner, where “alk” refers to a C₁₋₆ alkylene, unless otherwise noted, and the attached chemical structure is as defined herein.

[0771] The term “alkcycloalkyl” represents a cycloalkyl group, as defined herein, attached to the parent molecular group through an alkylene group, as defined herein (e.g., an alkylene group of from 1 to 4, from 1 to 6, from 1 to 10, or form 1 to 20 carbons). In some embodiments, the alkylene and the cycloalkyl each can be further substituted with 1, 2, 3, or 4 substituent groups as defined herein for the respective group.

[0772] The term “alkenyl,” as used herein, represents monovalent straight or branched chain groups of, unless otherwise specified, from 2 to 20 carbons (e.g., from 2 to 6 or from 2 to 10 carbons) containing one or more carbon-carbon double bonds and is exemplified by ethenyl, 1-propenyl, 2-propenyl, 2-methyl-1-propenyl, 1-butenyl, 2-butenyl, and the like. Alkenyls include both cis and trans isomers. Alkenyl groups may be optionally substituted with 1, 2, 3, or 4 substituent groups that are selected, independently, from amino, aryl, cycloalkyl, or heterocyclyl (e.g., heteroaryl), as defined herein, or any of the exemplary alkyl substituent groups described herein.

[0773] The term “alkenyloxy” represents a chemical substituent of formula —OR, where R is a C₂₋₂₀ alkenyl group (e.g., C₂₋₆ or C₂₋₁₀ alkenyl), unless otherwise specified. Exemplary alkenyloxy groups include ethenyloxy, propenyloxy, and the like. In some embodiments, the alkenyl group can be further substituted with 1, 2, 3, or 4 substituent groups as defined herein (e.g., a hydroxy group).

[0774] The term “alkheteroaryl” refers to a heteroaryl group, as defined herein, attached to the parent molecular group through an alkylene group, as defined herein. Exemplary unsubstituted alkheteroaryl groups are from 2 to 32 carbons (e.g., from 2 to 22, from 2 to 18, from 2 to 17, from 2 to 16, from 3 to 15, from 2 to 14, from 2 to 13, or from 2 to 12 carbons, such as C₁₋₆ alk-C₁₋₁₂ heteroaryl, C₁₋₁₀ alk-C₁₋₁₂ heteroaryl, or C₁₋₂₀ alk-C₁₋₁₂ heteroaryl). In some embodiments, the alkylene and the heteroaryl each can be further substituted with 1, 2, 3, or 4 substituent groups as defined herein for the respective group. Alkheteroaryl groups are a subset of alkheterocyclyl groups.

[0775] The term “alkheterocyclyl” represents a heterocyclyl group, as defined herein, attached to the parent molecular group through an alkylene group, as defined herein. Exemplary unsubstituted alkheterocyclyl groups are from 2 to 32 carbons (e.g., from 2 to 22, from 2 to 18, from 2 to 17, from 2 to 16, from 3 to 15, from 2 to 14, from 2 to 13, or from 2 to 12 carbons, such as C₁₋₆ alk-C₁₋₁₂ heterocyclyl, C₁₋₁₀ alk-C₁₋₁₂ heterocyclyl, or C₁₋₂₀ alk-C₁₋₁₂ heterocyclyl). In some embodiments, the alkylene and the heterocyclyl each can be further substituted with 1, 2, 3, or 4 substituent groups as defined herein for the respective group.

[0776] The term “alkoxy” represents a chemical substituent of formula —OR, where R is a C₁₋₂₀ alkyl group (e.g., C₁₋₆ or C₁₋₁₀ alkyl), unless otherwise specified. Exemplary alkoxy groups include methoxy, ethoxy, propoxy (e.g., n-propoxy and isopropoxy), t-butoxy, and the like. In some embodiments, the alkyl group can be further substituted with 1, 2, 3, or 4 substituent groups as defined herein (e.g., hydroxy or alkoxy).

[0777] The term “alkoxyalkoxy” represents an alkoxy group that is substituted with an alkoxy group. Exemplary unsubstituted alkoxyalkoxy groups include between 2 to 40 carbons (e.g., from 2 to 12 or from 2 to 20 carbons, such as C₁₋₆ alkoxy-C₁₋₆ alkoxy, C₁₋₁₀ alkoxy-C₁₋₁₀ alkoxy, or C₁₋₂₀ alkoxy-C₁₋₂₀ alkoxy). In some embodiments, the each alkoxy group can be further substituted with 1, 2, 3, or 4 substituent groups as defined herein.

[0778] The term “alkoxyalkyl” represents an alkyl group that is substituted with an alkoxy group. Exemplary unsubstituted alkoxyalkyl groups include between 2 to 40 carbons (e.g., from 2 to 12 or from 2 to 20 carbons, such as C₁₋₆ alkoxy-C₁₋₆ alkyl, C₁₋₁₀ alkoxy-C₁₋₁₀ alkyl, or C₁₋₂₀ alkoxy-C₁₋₂₀ alkyl). In some embodiments, the alkyl and the alkoxy each can be further substituted with 1, 2, 3, or 4 substituent groups as defined herein for the respective group.

[0779] The term “alkoxycarbonyl,” as used herein, represents an alkoxy, as defined herein, attached to the parent molecular group through a carbonyl atom (e.g., —C(O)—OR, where R is H or an optionally substituted C₁₋₆, C₁₋₁₀, or C₁₋₂₀ alkyl group). Exemplary unsubstituted alkoxycarbonyl include from 1 to 21 carbons (e.g., from 1 to 11 or from 1 to 7 carbons). In some embodiments, the alkoxy group is further substituted with 1, 2, 3, or 4 substituents as described herein.

[0780] The term “alkoxycarbonylalkoxy,” as used herein, represents an alkoxy group, as defined herein, that is substituted with an alkoxycarbonyl group, as defined herein (e.g., —O-alkyl-C(O)—OR, where R is an optionally substituted C₁₋₆, C₁₋₁₀, or C₁₋₂₀ alkyl group). Exemplary unsubstituted alkoxycarbonylalkoxy include from 3 to 41 carbons (e.g., from 3 to 10, from 3 to 13, from 3 to 17, from 3 to 21, or from 3 to 31 carbons, such as C₁₋₆ alkoxycarbonyl-C₁₋₆ alkoxy, C₁₋₁₀ alkoxycarbonyl-C₁₋₁₀ alkoxy, or C₁₋₂₀ alkoxycarbonyl-C₁₋₂₀ alkoxy). In some embodiments, each alkoxy group is further independently substituted with 1, 2, 3, or 4 substituents, as described herein (e.g., a hydroxy group).

[0781] The term “alkoxycarbonylalkyl,” as used herein, represents an alkyl group, as defined herein, that is substituted with an alkoxycarbonyl group, as defined herein (e.g., -alkyl-C(O)—OR, where R is an optionally substituted C₁₋₂₀, C₁₋₁₀, or C₁₋₆ alkyl group). Exemplary unsubstituted alkoxycarbonylalkyl include from 3 to 41 carbons (e.g., from 3 to 10, from 3 to 13, from 3 to 17, from 3 to 21, or from 3 to 31 carbons, such as C₁₋₆ alkoxycarbonyl-C₁₋₆ alkyl, C₁₋₁₀ alkoxycarbonyl-C₁₋₁₀ alkyl, or C₁₋₂₀ alkoxycarbonyl-C₁₋₂₀ alkyl). In some embodiments, each alkyl and alkoxy group is further independently substituted with 1, 2, 3, or 4 substituents as described herein (e.g., a hydroxy group).

[0782] The term “alkyl,” as used herein, is inclusive of both straight chain and branched chain saturated groups from 1 to 20 carbons (e.g., from 1 to 10 or from 1 to 6), unless otherwise specified. Alkyl groups are exemplified by methyl, ethyl, n- and iso-propyl, n-, sec-, iso- and tert-butyl, neopentyl, and the like, and may be optionally substituted with one, two, three, or, in the case of alkyl groups of two carbons or more, four substituents independently selected from the group consisting of: (1) C₁₋₆ alkoxy; (2) C₁₋₆ alkylsulfinyl; (3) amino, as defined herein (e.g., unsubstituted amino (i.e., —NH₂) or a substituted amino (i.e., —N(R^{N1})₂, where R^{N1} is as defined for amino); (4) C₆₋₁₀ aryl-C₁₋₆ alkoxy; (5) azido; (6) halo; (7) (C₂₋₉ heterocyclyl)oxy; (8) hydroxy; (9) nitro; (10) oxo (e.g., carboxyaldehyde or acyl); (11) C₁₋₇ spirocyclyl; (12) thioalkoxy; (13) thiol; (14) —CO₂R^{A′}, where R^{A′} is selected from the group consisting of (a) C₁₋₂₀ alkyl (e.g., C₁₋₆ alkyl), (b) C₂₋₂₀ alkenyl (e.g., C₂₋₆ alkenyl), (c) C₆₋₁₀ aryl, (d) hydrogen, (e) C₁₋₆ alk-C₆₋₁₀ aryl, (f) amino-C₁₋₂₀ alkyl, (g) polyethylene glycol of —(CH₂)ₛ₂(OCH₂CH₂)ₛ₁(CH₂)ₛ₃OR′, wherein s1 is an integer from 1 to 10 (e.g., from 1 to 6 or from 1 to 4), each of s2 and s3, independently, is an integer from 0 to 10 (e.g., from 0 to 4, from 0 to 6, from 1 to 4, from 1 to 6, or from 1 to 10), and R′ is H or C₁₋₂₀ alkyl, and (h) amino-polyethylene glycol of —NR^{N1}(CH₂)ₛ₂(CH₂CH₂O)ₛ₁(CH₂)ₛ₃NR^{N1}, wherein s1 is an integer from 1 to 10 (e.g., from 1 to 6 or from 1 to 4), each of s2 and s3, independently, is an integer from 0 to 10 (e.g., from 0 to 4, from 0 to 6, from 1 to 4, from 1 to 6, or from 1 to 10), and each R^{N1} is, independently, hydrogen or optionally substituted C₁₋₆ alkyl; (15) —C(O)NR^{B′}R^{C′}, where each of R^{B′} and R^{C′} is, independently, selected from the group consisting of (a) hydrogen, (b) C₁₋₆ alkyl, (c) C₆₋₁₀ aryl, and (d) C₁₋₆ alk-C₆₋₁₀ aryl; (16) —SO₂R^{D′}, where R^{D′} is selected from the group consisting of (a) C₁₋₆ alkyl, (b) C₆₋₁₀ aryl, (c) C₁₋₆ alk-C₆₋₁₀ aryl, and (d) hydroxy; (17) —SO₂NR^{E′}R^{F′}, where each of R^{E′} and R^{F′} is, independently, selected from the group consisting of (a) hydrogen, (b) C₁₋₆ alkyl, (c) C₆₋₁₀ aryl and (d) C₁₋₆ alk-C₆₋₁₀ aryl; (18) —C(O)R^{G′}, where R^{G′} is selected from the group consisting of (a) C₁₋₂₀ alkyl (e.g., C₁₋₆ alkyl), (b) C₂₋₂₀ alkenyl (e.g., C₂₋₆ alkenyl), (c) C₆₋₁₀ aryl, (d) hydrogen, (e) C₁₋₆ alk-C₆₋₁₀ aryl, (f) amino-C₁₋₂₀ alkyl, (g) polyethylene glycol of —(CH₂)ₛ₂(OCH₂CH₂)ₛ₁(CH₂)ₛ₃OR′, wherein s1 is an integer from 1 to 10 (e.g., from 1 to 6 or from 1 to 4), each of s2 and s3, independently, is an integer from 0 to 10 (e.g., from 0 to 4, from 0 to 6, from 1 to 4, from 1 to 6, or from 1 to 10), and R′ is H or C₁₋₂₀ alkyl, and (h) amino-polyethylene glycol of —NR^{N1}(CH₂)ₛ₂(CH₂CH₂O)ₛ₁(CH₂)ₛ₃NR^{N1}, wherein s1 is an integer from 1 to 10 (e.g., from 1 to 6 or from 1 to 4), each of s2 and s3, independently, is an integer from 0 to 10 (e.g., from 0 to 4, from 0 to 6, from 1 to 4, from 1 to 6, or from 1 to 10), and each R^{N1} is, independently, hydrogen or optionally substituted C₁₋₆ alkyl; (19) —NR^{H′}C(O)R^{I′}, wherein R^{H′} is selected from the group consisting of (al) hydrogen and (b1) C₁₋₆ alkyl, and R^{I′} is selected from the group consisting of (a2) C₁₋₂₀ alkyl (e.g., C₁₋₆ alkyl), (b2) C₂₋₂₀ alkenyl (e.g., C₂₋₆ alkenyl), (c2) C₆₋₁₀ aryl, (d2) hydrogen, (e2) C₁₋₆ alk-C₆₋₁₀ aryl, (f2) amino-C₁₋₂₀ alkyl, (g2) polyethylene glycol of —(CH₂)ₛ₂(OCH₂CH₂)ₛ₁(CH₂)ₛ₃OR′, wherein s1 is an integer from 1 to 10 (e.g., from 1 to 6 or from 1 to 4), each of s2 and s3, independently, is an integer from 0 to 10 (e.g., from 0 to 4, from 0 to 6, from 1 to 4, from 1 to 6, or from 1 to 10), and R′ is H or C₁₋₂₀ alkyl, and (h2) amino-polyethylene glycol of —NR^{N1}(CH₂)ₛ₂(CH₂CH₂O)ₛ₁(CH₂)ₛ₃NR^{N1}, wherein s1 is an integer from 1 to 10 (e.g., from 1 to 6 or from 1 to 4), each of s2 and s3, independently, is an integer from 0 to 10 (e.g., from 0 to 4, from 0 to 6, from 1 to 4, from 1 to 6, or from 1 to 10), and each R^{N1} is, independently, hydrogen or optionally substituted C₁₋₆ alkyl; (20) —NR^{J′}C(O)OR^{K′}, wherein R^{J′} is selected from the group consisting of (al) hydrogen and (b1) C₁₋₆ alkyl, and R^{K′} is selected from the group consisting of (a2) C₁₋₂₀ alkyl (e.g., C₁₋₆ alkyl), (b2) C₂₋₂₀ alkenyl (e.g., C₂₋₆ alkenyl), (c2) C₆₋₁₀ aryl, (d2) hydrogen, (e2) C₁₋₆ alk-C₆₋₁₀ aryl, (f2) amino-C₁₋₂₀ alkyl, (g2) polyethylene glycol of —(CH₂)ₛ₂(OCH₂CH₂)ₛ₁(CH₂)ₛ₃OR′, wherein s1 is an integer from 1 to 10 (e.g., from 1 to 6 or from 1 to 4), each of s2 and s3, independently, is an integer from 0 to 10 (e.g., from 0 to 4, from 0 to 6, from 1 to 4, from 1 to 6, or from 1 to 10), and R′ is H or C₁₋₂₀ alkyl, and (h2) amino-polyethylene glycol of —NR^{N1}(CH₂)ₛ₂(CH₂CH₂O)ₛ₁(CH₂)ₛ₃NR^{N1}, wherein s1 is an integer from 1 to 10 (e.g., from 1 to 6 or from 1 to 4), each of s2 and s3, independently, is an integer from 0 to 10 (e.g., from 0 to 4, from 0 to 6, from 1 to 4, from 1 to 6, or from 1 to 10), and each R^{N1} is, independently, hydrogen or optionally substituted C₁₋₆ alkyl; and (21) amidine. In some embodiments, each of these groups can be further substituted as described herein. For example, the alkylene group of a C1-alkaryl can be further substituted with an oxo group to afford the respective aryloyl substituent.

[0783] The term “alkylene” and the prefix “alk-,” as used herein, represent a saturated divalent hydrocarbon group derived from a straight or branched chain saturated hydrocarbon by the removal of two hydrogen atoms, and is exemplified by methylene, ethylene, isopropylene, and the like. The term “C_{x-y} alkylene” and the prefix “C_{x-y} alk-” represent alkylene groups having between x and y carbons. Exemplary values for x are 1, 2, 3, 4, 5, and 6, and exemplary values for y are 2, 3, 4, 5, 6, 7, 8, 9, 10, 12, 14, 16, 18, or 20 (e.g., C₁₋₆, C₁₋₁₀, C₂₋₂₀, C₂₋₆, C₂₋₁₀, or C₂₋₂₀ alkylene). In some embodiments, the alkylene can be further substituted with 1, 2, 3, or 4 substituent groups as defined herein for an alkyl group.

[0784] The term “alkylsulfinyl,” as used herein, represents an alkyl group attached to the parent molecular group through an —S(O)—group. Exemplary unsubstituted alkylsulfinyl groups are from 1 to 6, from 1 to 10, or from 1 to 20 carbons. In some embodiments, the alkyl group can be further substituted with 1, 2, 3, or 4 substituent groups as defined herein.

[0785] The term “alkylsulfinylalkyl,” as used herein, represents an alkyl group, as defined herein, substituted by an alkylsulfinyl group. Exemplary unsubstituted alkylsulfinylalkyl groups are from 2 to 12, from 2 to 20, or from 2 to 40 carbons. In some embodiments, each alkyl group can be further substituted with 1, 2, 3, or 4 substituent groups as defined herein.

[0786] The term “alkynyl,” as used herein, represents monovalent straight or branched chain groups from 2 to 20 carbon atoms (e.g., from 2 to 4, from 2 to 6, or from 2 to 10 carbons) containing a carbon-carbon triple bond and is exemplified by ethynyl, 1-propynyl, and the like. Alkynyl groups may be optionally substituted with 1, 2, 3, or 4 substituent groups that are selected, independently, from aryl, cycloalkyl, or heterocyclyl (e.g., heteroaryl), as defined herein, or any of the exemplary alkyl substituent groups described herein.

[0787] The term “alkynyloxy” represents a chemical substituent of formula —OR, where R is a C₂₋₂₀ alkynyl group (e.g., C₂₋₆ or C₂₋₁₀ alkynyl), unless otherwise specified. Exemplary alkynyloxy groups include ethynyloxy, propynyloxy, and the like. In some embodiments, the alkynyl group can be further substituted with 1, 2, 3, or 4 substituent groups as defined herein (e.g., a hydroxy group).

[0788] The term “amidine,” as used herein, represents a —C(═NH)NH₂ group.

[0789] The term “amino,” as used herein, represents —N(R^{N1})₂, wherein each R^{N1} is, independently, H, OH, NO₂, N(R^{N2})₂, SO₂OR^{N2}, SO₂R^{N2}, SOR^{N2}, an N-protecting group, alkyl, alkenyl, alkynyl, alkoxy, aryl, alkaryl, cycloalkyl, alkcycloalkyl, carboxyalkyl, sulfoalkyl, heterocyclyl (e.g., heteroaryl), or alkheterocyclyl (e.g., alkheteroaryl), wherein each of these recited R^{N1} groups can be optionally substituted, as defined herein for each group; or two R^{N1} combine to form a heterocyclyl or an N-protecting group, and wherein each R^{N2} is, independently, H, alkyl, or aryl. The amino groups of the invention can be an unsubstituted amino (i.e., —NH₂) or a substituted amino (i.e., —N(R^{N1})₂). In a preferred embodiment, amino is —NH₂ or —NHR^{N1}, wherein R^{N1} is, independently, OH, NO₂, NH₂, NR^{N2}₂, SO₂OR^{N2}, SO₂R^{N2}, SOR^{N2}, alkyl, carboxyalkyl, sulfoalkyl, or aryl, and each R^{N2} can be H, C₁₋₂₀ alkyl (e.g., C₁₋₆ alkyl), or C₁₋₁₀ aryl.

[0790] The term “amino acid,” as described herein, refers to a molecule having a side chain, an amino group, and an acid group (e.g., a carboxy group of —CO₂H or a sulfo group of —SO₃H), wherein the amino acid is attached to the parent molecular group by the side chain, amino group, or acid group (e.g., the side chain). In some embodiments, the amino acid is attached to the parent molecular group by a carbonyl group, where the side chain or amino group is attached to the carbonyl group. Exemplary side chains include an optionally substituted alkyl, aryl, heterocyclyl, alkaryl, alkheterocyclyl, aminoalkyl, carbamoylalkyl, and carboxyalkyl. Exemplary amino acids include alanine, arginine, asparagine, aspartic acid, cysteine, glutamic acid, glutamine, glycine, histidine, hydroxynorvaline, isoleucine, leucine, lysine, methionine, norvaline, ornithine, phenylalanine, proline, pyrrolysine, selenocysteine, serine, taurine, threonine, tryptophan, tyrosine, and valine. Amino acid groups may be optionally substituted with one, two, three, or, in the case of amino acid groups of two carbons or more, four substituents independently selected from the group consisting of: (1) C₁₋₆ alkoxy; (2) C₁₋₆ alkylsulfinyl; (3) amino, as defined herein (e.g., unsubstituted amino (i.e., —NH₂) or a substituted amino (i.e., —N(R^{N1})₂, where R^{N1} is as defined for amino); (4) C₆₋₁₀ aryl-C₁₋₆ alkoxy; (5) azido; (6) halo; (7) (C₂₋₉ heterocyclyl)oxy; (8) hydroxy; (9) nitro; (10) oxo (e.g., carboxyaldehyde or acyl); (11) C₁₋₇ spirocyclyl; (12) thioalkoxy; (13) thiol; (14) —CO₂R^{A′}, where R^{A′} is selected from the group consisting of (a) C₁₋₂₀ alkyl (e.g., C₁₋₆ alkyl), (b) C₂₋₂₀ alkenyl (e.g., C₂₋₆ alkenyl), (c) C₆₋₁₀ aryl, (d) hydrogen, (e) C₁₋₆ alk-C₆₋₁₀ aryl, (f) amino-C₁₋₂₀ alkyl, (g) polyethylene glycol of —(CH₂)ₛ₂(OCH₂CH₂)ₛ₁(CH₂)ₛ₃₀R′, wherein s1 is an integer from 1 to 10 (e.g., from 1 to 6 or from 1 to 4), each of s2 and s3, independently, is an integer from 0 to 10 (e.g., from 0 to 4, from 0 to 6, from 1 to 4, from 1 to 6, or from 1 to 10), and R′ is H or C₁₋₂₀ alkyl, and (h) amino-polyethylene glycol of —NR^{N1}(CH₂)ₛ₂(CH₂CH₂O)ₛ₁(CH₂)ₛ₃NR^{N1}, wherein s1 is an integer from 1 to 10 (e.g., from 1 to 6 or from 1 to 4), each of s2 and s3, independently, is an integer from 0 to 10 (e.g., from 0 to 4, from 0 to 6, from 1 to 4, from 1 to 6, or from 1 to 10), and each R^{N1} is, independently, hydrogen or optionally substituted C₁₋₆ alkyl; (15) —C(O)NR^{B′}R^{C′}, where each of R^{B′} and R^{C′} is, independently, selected from the group consisting of (a) hydrogen, (b) C₁₋₆ alkyl, (c) C₁₋₁₀ aryl, and (d) C₁₋₆ alk-C₆₋₁₀ aryl; (16) —SO₂R^{D′}, where R^{D′} is selected from the group consisting of (a) C₁₋₆ alkyl, (b) C₆₋₁₀ aryl, (c) C₁₋₆ alk-C₆₋₁₀ aryl, and (d) hydroxy; (17) —SO₂NR^{E′}R^{F′}, where each of R^{E′} and R^{F′} is, independently, selected from the group consisting of (a) hydrogen, (b) C₁₋₆ alkyl, (c) C₆₋₁₀ aryl and (d) C₁₋₆ alk-C₆₋₁₀ aryl; (18) —C(O)R^{G′}, where R^{G′} is selected from the group consisting of (a) C₁₋₂₀ alkyl (e.g., C₁₋₆ alkyl), (b) C₂₋₂₀ alkenyl (e.g., C₂₋₆ alkenyl), (c) C₆₋₁₀ aryl, (d) hydrogen, (e) C₁₋₆ alk-C₆₋₁₀ aryl, (f) amino-C₁₋₂₀ alkyl, (g) polyethylene glycol of —(CH₂)ₛ₂(OCH₂CH₂)ₛ₁(CH₂)ₛ₃OR′, wherein s1 is an integer from 1 to 10 (e.g., from 1 to 6 or from 1 to 4), each of s2 and s3, independently, is an integer from 0 to 10 (e.g., from 0 to 4, from 0 to 6, from 1 to 4, from 1 to 6, or from 1 to 10), and R′ is H or C₁₋₂₀ alkyl, and (h) amino-polyethylene glycol of —NR^{N1}(CH₂)ₛ₂(CH₂CH₂O)ₛ₁(CH₂)ₛ₃NR^{N1}, wherein s1 is an integer from 1 to 10 (e.g., from 1 to 6 or from 1 to 4), each of s2 and s3, independently, is an integer from 0 to 10 (e.g., from 0 to 4, from 0 to 6, from 1 to 4, from 1 to 6, or from 1 to 10), and each R^{N1} is, independently, hydrogen or optionally substituted C₁₋₆ alkyl; (19) —NR^{H′}C(O)R^{I′}, wherein R^{H′} is selected from the group consisting of (a1) hydrogen and (b1) C₁₋₆ alkyl, and R^{I′} is selected from the group consisting of (a2) C₁₋₂₀ alkyl (e.g., C₁₋₆ alkyl), (b2) C₂₋₂₀ alkenyl (e.g., C₂₋₆ alkenyl), (c2) C₁₋₁₀ aryl, (d2) hydrogen, (e2) C₁₋₆ alk-C₆₋₁₀ aryl, (f2) amino-C₁₋₂₀ alkyl, (g2) polyethylene glycol of —(CH₂)ₛ₂(OCH₂CH₂)ₛ₁(CH₂)ₛ₃OR′, wherein s1 is an integer from 1 to 10 (e.g., from 1 to 6 or from 1 to 4), each of s2 and s3, independently, is an integer from 0 to 10 (e.g., from 0 to 4, from 0 to 6, from 1 to 4, from 1 to 6, or from 1 to 10), and R′ is H or C₁₋₂₀ alkyl, and (h2) amino-polyethylene glycol of —NR^{N1}(CH₂)ₛ₂(CH₂CH₂O)ₛ₁(CH₂)ₛ₃NR^{N1}, wherein s1 is an integer from 1 to 10 (e.g., from 1 to 6 or from 1 to 4), each of s2 and s3, independently, is an integer from 0 to 10 (e.g., from 0 to 4, from 0 to 6, from 1 to 4, from 1 to 6, or from 1 to 10), and each R^{N1} is, independently, hydrogen or optionally substituted C₁₋₆ alkyl; (20) —NR^{J′}C(O)OR^{K′}, wherein R^{J′} is selected from the group consisting of (a1) hydrogen and (b1) C₁₋₆ alkyl, and R^{K′} is selected from the group consisting of (a2) C₁₋₂₀ alkyl (e.g., C₁₋₆ alkyl), (b2) C₂₋₂₀ alkenyl (e.g., C₂₋₆ alkenyl), (c2) C₆₋₁₀ aryl, (d2) hydrogen, (e2) C₁₋₆ alk-C₆₋₁₀ aryl, (f2) amino-C₁₋₂₀ alkyl, (g2) polyethylene glycol of —(CH₂)ₛ₂(OCH₂CH₂)ₛ₁(CH₂)ₛ₃OR′, wherein s1 is an integer from 1 to 10 (e.g., from 1 to 6 or from 1 to 4), each of s2 and s3, independently, is an integer from 0 to 10 (e.g., from 0 to 4, from 0 to 6, from 1 to 4, from 1 to 6, or from 1 to 10), and R′ is H or C₁₋₂₀ alkyl, and (h2) amino-polyethylene glycol of —NR^{N1}(CH₂)ₛ₂(CH₂CH₂O)ₛ₁(CH₂)ₛ₃NR^{N1}, wherein s1 is an integer from 1 to 10 (e.g., from 1 to 6 or from 1 to 4), each of s2 and s3, independently, is an integer from 0 to 10 (e.g., from 0 to 4, from 0 to 6, from 1 to 4, from 1 to 6, or from 1 to 10), and each R^{N1} is, independently, hydrogen or optionally substituted C₁₋₆ alkyl; and (21) amidine. In some embodiments, each of these groups can be further substituted as described herein.

[0791] The term “aminoalkoxy,” as used herein, represents an alkoxy group, as defined herein, substituted by an amino group, as defined herein. The alkyl and amino each can be further substituted with 1, 2, 3, or 4 substituent groups as described herein for the respective group (e.g., CO₂R^{A′}, where R^{A′} is selected from the group consisting of (a) C₁₋₆ alkyl, (b) C₆₋₁₀ aryl, (c) hydrogen, and (d) C₁₋₆ alk-C₆₋₁₀ aryl, e.g., carboxy).

[0792] The term “aminoalkyl,” as used herein, represents an alkyl group, as defined herein, substituted by an amino group, as defined herein. The alkyl and amino each can be further substituted with 1, 2, 3, or 4 substituent groups as described herein for the respective group (e.g., CO₂R^{A′}, where R^{A′} is selected from the group consisting of (a) C₁₋₆ alkyl, (b) C₆₋₁₀ aryl, (c) hydrogen, and (d) C₁₋₆ alk-C₆₋₁₀ aryl, e.g., carboxy).

[0793] The term “aryl,” as used herein, represents a mono-, bicyclic, or multicyclic carbocyclic ring system having one or two aromatic rings and is exemplified by phenyl, naphthyl, 1,2-dihydronaphthyl, 1,2,3,4-tetrahydronaphthyl, anthracenyl, phenanthrenyl, fluorenyl, indanyl, indenyl, and the like, and may be optionally substituted with 1, 2, 3, 4, or 5 substituents independently selected from the group consisting of: (1) C₁₋₇ acyl (e.g., carboxyaldehyde); (2) C₁₋₂₀ alkyl (e.g., C₁₋₆ alkyl, C₁₋₆ alkoxy-C₁₋₆ alkyl, C₁₋₆ alkylsulfinyl-C₁₋₆ alkyl, amino-C₁₋₆ alkyl, azido-C₁₋₆ alkyl, (carboxyaldehyde)-C₁₋₆ alkyl, halo-C₁₋₆ alkyl (e.g., perfluoroalkyl), hydroxy-C₁₋₆ alkyl, nitro-C₁₋₆ alkyl, or C₁₋₆ thioalkoxy-C₁₋₆ alkyl); (3) C₁₋₂₀ alkoxy (e.g., C₁₋₆ alkoxy, such as perfluoroalkoxy); (4) C₁₋₆ alkylsulfinyl; (5) C₆₋₁₀ aryl; (6) amino; (7) C₁₋₆ alk-C₆₋₁₀ aryl; (8) azido; (9) C₃₋₈ cycloalkyl; (10) C₁₋₆ alk-C₃₋₈ cycloalkyl; (11) halo; (12) C₁₋₁₂ heterocyclyl (e.g., C₁₋₁₂ heteroaryl); (13) (C₁₋₁₂ heterocyclyl)oxy; (14) hydroxy; (15) nitro; (16) C₁₋₂₀ thioalkoxy (e.g., C₁₋₆ thioalkoxy); (17) —(CH₂)_{q}CO₂R^{A′}, where q is an integer from zero to four, and R^{A′} is selected from the group consisting of (a) C₁₋₆ alkyl, (b) C₆₋₁₀ aryl, (c) hydrogen, and (d) C₁₋₆ alk-C₆₋₁₀ aryl; (18) —(CH₂)_{q}CONR^{B′}R^{C′}, where q is an integer from zero to four and where R^{B′} and R^{C′} are independently selected from the group consisting of (a) hydrogen, (b) C₁₋₆ alkyl, (c) C₆₋₁₀ aryl, and (d) C₁₋₆ alk-C₆₋₁₀ aryl; (19) —(CH₂)_{q}SO₂R^{D′}, where q is an integer from zero to four and where R^{D′} is selected from the group consisting of (a) alkyl, (b) C₁₋₁₀ aryl, and (c) alk-C₆₋₁₀ aryl; (20) —(CH₂)_{q}SO₂NR^{E′}R^{F′}, where q is an integer from zero to four and where each of R^{E′} and R^{F′} is, independently, selected from the group consisting of (a) hydrogen, (b) C₁₋₆ alkyl, (c) C₆₋₁₀ aryl, and (d) C₁₋₆ alk-C₆₋₁₀ aryl; (21) thiol; (22) C₆₋₁₀ aryloxy; (23) C₃₋₈ cycloalkoxy; (24) C₆₋₁₀ aryl-C₁₋₆ alkoxy; (25) C₁₋₆ alk-C₁₋₁₂ heterocyclyl (e.g., C₁₋₆ alk-C₁₋₁₂ heteroaryl); (26) C₂₋₂₀ alkenyl; and (27) C₂₋₂₀ alkynyl. In some embodiments, each of these groups can be further substituted as described herein. For example, the alkylene group of a C₁-alkaryl or a C₁-alkheterocyclyl can be further substituted with an oxo group to afford the respective aryloyl and (heterocyclyl)oyl substituent group.

[0794] The term “arylalkoxy,” as used herein, represents an alkaryl group, as defined herein, attached to the parent molecular group through an oxygen atom. Exemplary unsubstituted alkoxyalkyl groups include from 7 to 30 carbons (e.g., from 7 to 16 or from 7 to 20 carbons, such as C₆₋₁₀ aryl-C₁₋₆ alkoxy, C₆₋₁₀ aryl-C₁₋₁₀ alkoxy, or C₆₋₁₀ aryl-C₁₋₂₀ alkoxy). In some embodiments, the arylalkoxy group can be substituted with 1, 2, 3, or 4 substituents as defined herein

[0795] The term “aryloxy” represents a chemical substituent of formula —OR′, where R′ is an aryl group of 6 to 18 carbons, unless otherwise specified. In some embodiments, the aryl group can be substituted with 1, 2, 3, or 4 substituents as defined herein.

[0796] The term “aryloyl,” as used herein, represents an aryl group, as defined herein, that is attached to the parent molecular group through a carbonyl group. Exemplary unsubstituted aryloyl groups are of 7 to 11 carbons. In some embodiments, the aryl group can be substituted with 1, 2, 3, or 4 substituents as defined herein.

[0797] The term “azido” represents an —N₃ group, which can also be represented as —N═N═N.

[0798] The term “bicyclic,” as used herein, refer to a structure having two rings, which may be aromatic or non-aromatic. Bicyclic structures include spirocyclyl groups, as defined herein, and two rings that share one or more bridges, where such bridges can include one atom or a chain including two, three, or more atoms. Exemplary bicyclic groups include a bicyclic carbocyclyl group, where the first and second rings are carbocyclyl groups, as defined herein; a bicyclic aryl groups, where the first and second rings are aryl groups, as defined herein; bicyclic heterocyclyl groups, where the first ring is a heterocyclyl group and the second ring is a carbocyclyl (e.g., aryl) or heterocyclyl (e.g., heteroaryl) group; and bicyclic heteroaryl groups, where the first ring is a heteroaryl group and the second ring is a carbocyclyl (e.g., aryl) or heterocyclyl (e.g., heteroaryl) group. In some embodiments, the bicyclic group can be substituted with 1, 2, 3, or 4 substituents as defined herein for cycloalkyl, heterocyclyl, and aryl groups.

[0799] The terms “carbocyclic” and “carbocyclyl,” as used herein, refer to an optionally substituted C₃₋₁₂ monocyclic, bicyclic, or tricyclic structure in which the rings, which may be aromatic or non-aromatic, are formed by carbon atoms. Carbocyclic structures include cycloalkyl, cycloalkenyl, and aryl groups.

[0800] The term “carbamoyl,” as used herein, represents —C(O)—N(R^{N1})₂, where the meaning of each R^{N1} is found in the definition of “amino” provided herein.

[0801] The term “carbamoylalkyl,” as used herein, represents an alkyl group, as defined herein, substituted by a carbamoyl group, as defined herein. The alkyl group can be further substituted with 1, 2, 3, or 4 substituent groups as described herein.

[0802] The term “carbamyl,” as used herein, refers to a carbamate group having the structure —NR^{N1}C(═O)OR or —OC(═O)N(R^{N1})₂, where the meaning of each R^{N1} is found in the definition of “amino” provided herein, and R is alkyl, cycloalkyl, alkcycloalkyl, aryl, alkaryl, heterocyclyl (e.g., heteroaryl), or alkheterocyclyl (e.g., alkheteroaryl), as defined herein.

[0803] The term “carbonyl,” as used herein, represents a C(O) group, which can also be represented as C═O.

[0804] The term “carboxyaldehyde” represents an acyl group having the structure —CHO.

[0805] The term “carboxy,” as used herein, means —CO₂H.

[0806] The term “carboxyalkoxy,” as used herein, represents an alkoxy group, as defined herein, substituted by a carboxy group, as defined herein. The alkoxy group can be further substituted with 1, 2, 3, or 4 substituent groups as described herein for the alkyl group.

[0807] The term “carboxyalkyl,” as used herein, represents an alkyl group, as defined herein, substituted by a carboxy group, as defined herein. The alkyl group can be further substituted with 1, 2, 3, or 4 substituent groups as described herein.

[0808] The term “cyano,” as used herein, represents an —CN group.

[0809] The term “cycloalkoxy” represents a chemical substituent of formula —OR, where R is a C₃₋₈ cycloalkyl group, as defined herein, unless otherwise specified. The cycloalkyl group can be further substituted with 1, 2, 3, or 4 substituent groups as described herein. Exemplary unsubstituted cycloalkoxy groups are from 3 to 8 carbons. In some embodiment, the cycloalkyl group can be further substituted with 1, 2, 3, or 4 substituent groups as described herein.

[0810] The term “cycloalkyl,” as used herein represents a monovalent saturated or unsaturated non-aromatic cyclic hydrocarbon group from three to eight carbons, unless otherwise specified, and is exemplified by cyclopropyl, cyclobutyl, cyclopentyl, cyclohexyl, cycloheptyl, bicyclo[2.2.1.]heptyl, and the like. When the cycloalkyl group includes one carbon-carbon double bond, the cycloalkyl group can be referred to as a “cycloalkenyl” group. Exemplary cycloalkenyl groups include cyclopentenyl, cyclohexenyl, and the like. The cycloalkyl groups of this invention can be optionally substituted with: (1) C₁₋₇ acyl (e.g., carboxyaldehyde); (2) C₁₋₂₀ alkyl (e.g., C₁₋₆ alkyl, C₁₋₆ alkoxy-C₁₋₆ alkyl, C₁₋₆ alkylsulfinyl-C₁₋₆ alkyl, amino-C₁₋₆ alkyl, azido-C₁₋₆ alkyl, (carboxyaldehyde)-C₁₋₆ alkyl, halo-C₁₋₆ alkyl (e.g., perfluoroalkyl), hydroxy-C₁₋₆ alkyl, nitro-C₁₋₆ alkyl, or C₁₋₆ thioalkoxy-C₁₋₆ alkyl); (3) C₁₋₂₀ alkoxy (e.g., C₁₋₆ alkoxy, such as perfluoroalkoxy); (4) C₁₋₆ alkylsulfinyl; (5) C₁₋₁₀ aryl; (6) amino; (7) C₁₋₆ alk-C₆₋₁₀ aryl; (8) azido; (9) C₃₋₈ cycloalkyl; (10) C₁₋₆ alk-C₃₋₈ cycloalkyl; (11) halo; (12) C₁₋₁₂ heterocyclyl (e.g., C₁₋₁₂ heteroaryl); (13) (C₁₋₁₂ heterocyclyl)oxy; (14) hydroxy; (15) nitro; (16) C₁₋₂₀ thioalkoxy (e.g., C₁₋₆ thioalkoxy); (17) —(CH₂)_{q}CO₂R^{A′}, where q is an integer from zero to four, and R^{A′} is selected from the group consisting of (a) C₁₋₆ alkyl, (b) C₆₋₁₀ aryl, (c) hydrogen, and (d) C₁₋₆ alk-C₆₋₁₀ aryl; (18) —(CH₂)_{q}CONR^{B′}R^{C′}, where q is an integer from zero to four and where R^{B′} and R^{C′} are independently selected from the group consisting of (a) hydrogen, (b) C₆₋₁₀ alkyl, (c) C₆₋₁₀ aryl, and (d) C₁₋₆ alk-C₆₋₁₀ aryl; (19) —(CH₂)_{q}SO₂R^{D′}, where q is an integer from zero to four and where R^{D′} is selected from the group consisting of (a) C₁₋₁₀ alkyl, (b) C₆₋₁₀ aryl, and (c) C₁₋₆ alk-C₆₋₁₀ aryl; (20) —(CH₂)_{q}SO₂NR^{E′}R^{F′}, where q is an integer from zero to four and where each of R^{E′} and R^{F′} is, independently, selected from the group consisting of (a) hydrogen, (b) C₆₋₁₀ alkyl, (c) C₆₋₁₀ aryl, and (d) C₁₋₆ alk-C₆₋₁₀ aryl; (21) thiol; (22) C₆₋₁₀ aryloxy; (23) C₃₋₈ cycloalkoxy; (24) C₆₋₁₀ aryl-C₁₋₆ alkoxy; (25) C₁₋₆ alk-C₁₋₁₂ heterocyclyl (e.g., C₁₋₆ alk-C₁₋₁₂ heteroaryl); (26) oxo; (27) C₂₋₂₀ alkenyl; and (28) C₂₋₂₀ alkynyl. In some embodiments, each of these groups can be further substituted as described herein. For example, the alkylene group of a C₁-alkaryl or a C₁-alkheterocyclyl can be further substituted with an oxo group to afford the respective aryloyl and (heterocyclyl)oyl substituent group.

[0811] The term “diastereomer,” as used herein means stereoisomers that are not mirror images of one another and are non-superimposable on one another.

[0812] The term “effective amount” of an agent, as used herein, is that amount sufficient to effect beneficial or desired results, for example, clinical results, and, as such, an “effective amount” depends upon the context in which it is being applied. For example, in the context of administering an agent that treats cancer, an effective amount of an agent is, for example, an amount sufficient to achieve treatment, as defined herein, of cancer, as compared to the response obtained without administration of the agent.

[0813] The term “enantiomer,” as used herein, means each individual optically active form of a compound of the invention, having an optical purity or enantiomeric excess (as determined by methods standard in the art) of at least 80% (i.e., at least 90% of one enantiomer and at most 10% of the other enantiomer), preferably at least 90% and more preferably at least 98%.

[0814] The term “halo,” as used herein, represents a halogen selected from bromine, chlorine, iodine, or fluorine.

[0815] The term “haloalkoxy,” as used herein, represents an alkoxy group, as defined herein, substituted by a halogen group (i.e., F, Cl, Br, or I). A haloalkoxy may be substituted with one, two, three, or, in the case of alkyl groups of two carbons or more, four halogens. Haloalkoxy groups include perfluoroalkoxys (e.g., —OCF₃), —OCHF₂, —OCH₂F, —OCCl₃, —OCH₂CH₂Br, —OCH₂CH(CH₂CH₂Br)CH₃, and —OCHICH₃. In some embodiments, the haloalkoxy group can be further substituted with 1, 2, 3, or 4 substituent groups as described herein for alkyl groups.

[0816] The term “haloalkyl,” as used herein, represents an alkyl group, as defined herein, substituted by a halogen group (i.e., F, Cl, Br, or I). A haloalkyl may be substituted with one, two, three, or, in the case of alkyl groups of two carbons or more, four halogens. Haloalkyl groups include perfluoroalkyls (e.g., —CF₃), —CHF₂, —CH₂F, —CCl₃, —CH₂CH₂Br, —CH₂CH(CH₂CH₂Br)CH₃, and —CHICH₃. In some embodiments, the haloalkyl group can be further substituted with 1, 2, 3, or 4 substituent groups as described herein for alkyl groups.

[0817] The term “heteroalkylene,” as used herein, refers to an alkylene group, as defined herein, in which one or two of the constituent carbon atoms have each been replaced by nitrogen, oxygen, or sulfur. In some embodiments, the heteroalkylene group can be further substituted with 1, 2, 3, or 4 substituent groups as described herein for alkylene groups.

[0818] The term “heteroaryl,” as used herein, represents that subset of heterocyclyls, as defined herein, which are aromatic: i.e., they contain 4n+2 pi electrons within the mono- or multicyclic ring system. Exemplary unsubstituted heteroaryl groups are of 1 to 12 (e.g., 1 to 11, 1 to 10, 1 to 9, 2 to 12, 2 to 11, 2 to 10, or 2 to 9) carbons. In some embodiment, the heteroaryl is substituted with 1, 2, 3, or 4 substituents groups as defined for a heterocyclyl group.

[0819] The term “heterocyclyl,” as used herein represents a 5-, 6- or 7-membered ring, unless otherwise specified, containing one, two, three, or four heteroatoms independently selected from the group consisting of nitrogen, oxygen, and sulfur. The 5-membered ring has zero to two double bonds, and the 6- and 7-membered rings have zero to three double bonds. Exemplary unsubstituted heterocyclyl groups are of 1 to 12 (e.g., 1 to 11, 1 to 10, 1 to 9, 2 to 12, 2 to 11, 2 to 10, or 2 to 9) carbons. The term “heterocyclyl” also represents a heterocyclic compound having a bridged multicyclic structure in which one or more carbons and/or heteroatoms bridges two non-adjacent members of a monocyclic ring, e.g., a quinuclidinyl group. The term “heterocyclyl” includes bicyclic, tricyclic, and tetracyclic groups in which any of the above heterocyclic rings is fused to one, two, or three carbocyclic rings, e.g., an aryl ring, a cyclohexane ring, a cyclohexene ring, a cyclopentane ring, a cyclopentene ring, or another monocyclic heterocyclic ring, such as indolyl, quinolyl, isoquinolyl, tetrahydroquinolyl, benzofuryl, benzothienyl and the like. Examples of fused heterocyclyls include tropanes and 1,2,3,5,8,8a-hexahydroindolizine. Heterocyclics include pyrrolyl, pyrrolinyl, pyrrolidinyl, pyrazolyl, pyrazolinyl, pyrazolidinyl, imidazolyl, imidazolinyl, imidazolidinyl, pyridyl, piperidinyl, homopiperidinyl, pyrazinyl, piperazinyl, pyrimidinyl, pyridazinyl, oxazolyl, oxazolidinyl, isoxazolyl, isoxazolidiniyl, morpholinyl, thiomorpholinyl, thiazolyl, thiazolidinyl, isothiazolyl, isothiazolidinyl, indolyl, indazolyl, quinolyl, isoquinolyl, quinoxalinyl, dihydroquinoxalinyl, quinazolinyl, cinnolinyl, phthalazinyl, benzimidazolyl, benzothiazolyl, benzoxazolyl, benzothiadiazolyl, furyl, thienyl, thiazolidinyl, isothiazolyl, triazolyl, tetrazolyl, oxadiazolyl (e.g., 1,2,3-oxadiazolyl), purinyl, thiadiazolyl (e.g., 1,2,3-thiadiazolyl), tetrahydrofuranyl, dihydrofuranyl, tetrahydrothienyl, dihydrothienyl, dihydroindolyl, dihydroquinolyl, tetrahydroquinolyl, tetrahydroisoquinolyl, dihydroisoquinolyl, pyranyl, dihydropyranyl, dithiazolyl, benzofuranyl, isobenzofuranyl, benzothienyl, and the like, including dihydro and tetrahydro forms thereof, where one or more double bonds are reduced and replaced with hydrogens. Still other exemplary heterocyclyls include: 2,3,4,5-tetrahydro-2-oxo-oxazolyl; 2,3-dihydro-2-oxo-1H-imidazolyl; 2,3,4,5-tetrahydro-5-oxo-1H-pyrazolyl (e.g., 2,3,4,5-tetrahydro-2-phenyl-5-oxo-1H-pyrazolyl); 2,3,4,5-tetrahydro-2,4-dioxo-1H-imidazolyl (e.g., 2,3,4,5-tetrahydro-2,4-dioxo-5-methyl-5-phenyl-1H-imidazolyl); 2,3-dihydro-2-thioxo-1,3,4-oxadiazolyl (e.g., 2,3-dihydro-2-thioxo-5-phenyl-1,3,4-oxadiazolyl); 4,5-dihydro-5-oxo-1H-triazolyl (e.g., 4,5-dihydro-3-methyl-4-amino 5-oxo-1H-triazolyl); 1,2,3,4-tetrahydro-2,4-dioxopyridinyl (e.g., 1,2,3,4-tetrahydro-2,4-dioxo-3,3-diethylpyridinyl); 2,6-dioxo-piperidinyl (e.g., 2,6-dioxo-3-ethyl-3-phenylpiperidinyl); 1,6-dihydro-6-oxopyridiminyl; 1,6-dihydro-4-oxopyrimidinyl (e.g., 2-(methylthio)-1,6-dihydro-4-oxo-5-methylpyrimidin-1-yl); 1,2,3,4-tetrahydro-2,4-dioxopyrimidinyl (e.g., 1,2,3,4-tetrahydro-2,4-dioxo-3-ethylpyrimidinyl); 1,6-dihydro-6-oxo-pyridazinyl (e.g., 1,6-dihydro-6-oxo-3-ethylpyridazinyl); 1,6-dihydro-6-oxo-1,2,4-triazinyl (e.g., 1,6-dihydro-5-isopropyl-6-oxo-1,2,4-triazinyl); 2,3-dihydro-2-oxo-1H-indolyl (e.g., 3,3-dimethyl-2,3-dihydro-2-oxo-1H-indolyl and 2,3-dihydro-2-oxo-3,3′-spiropropane-1H-indol-1-yl); 1,3-dihydro-1-oxo-2H-iso-indolyl; 1,3-dihydro-1,3-dioxo-2H-iso-indolyl; 1H-benzopyrazolyl (e.g., 1-(ethoxycarbonyl)-1H-benzopyrazolyl); 2,3-dihydro-2-oxo-1H-benzimidazolyl (e.g., 3-ethyl-2,3-dihydro-2-oxo-1H-benzimidazolyl); 2,3-dihydro-2-oxo-benzoxazolyl (e.g., 5-chloro-2,3-dihydro-2-oxo-benzoxazolyl); 2,3-dihydro-2-oxo-benzoxazolyl; 2-oxo-2H-benzopyranyl; 1,4-benzodioxanyl; 1,3-benzodioxanyl; 2,3-dihydro-3-oxo,4H-1,3-benzothiazinyl; 3,4-dihydro-4-oxo-3H-quinazolinyl (e.g., 2-methyl-3,4-dihydro-4-oxo-3H-quinazolinyl); 1,2,3,4-tetrahydro-2,4-dioxo-3H-quinazolyl (e.g., 1-ethyl-1,2,3,4-tetrahydro-2,4-dioxo-3H-quinazolyl); 1,2,3,6-tetrahydro-2,6-dioxo-7H-purinyl (e.g., 1,2,3,6-tetrahydro-1,3-dimethyl-2,6-dioxo-7H-purinyl); 1,2,3,6-tetrahydro-2,6-dioxo-1H-purinyl (e.g., 1,2,3,6-tetrahydro-3,7-dimethyl-2,6-dioxo-1H-purinyl); 2-oxobenz[c,d]indolyl; 1,1-dioxo-2H-naphth[1,8-c,d]isothiazolyl; and 1,8-naphthylenedicarboxamido. Additional heterocyclics include 3,3a,4,5,6,6a-hexahydro-pyrrolo[3,4-b]pyrrol-(2H)-yl, and 2,5-diazabicyclo[2.2.1]heptan-2-yl, homopiperazinyl (or diazepanyl), tetrahydropyranyl, dithiazolyl, benzofuranyl, benzothienyl, oxepanyl, thiepanyl, azocanyl, oxecanyl, and thiocanyl. Heterocyclic groups also include groups of the formula

[chemical structure]

where

[0820] E′ is selected from the group consisting of —N— and —CH—; F′ is selected from the group consisting of —N═CH—, —NH—CH₂—, —NH—C(O)—, —NH—, —CH═N—, —CH₂—NH—, —C(O)—NH—, —CH═CH—, —CH₂—, —CH₂CH₂—, —CH₂O—, —OCH₂—, —O—, and —S—; and G′ is selected from the group consisting of —CH— and —N—. Any of the heterocyclyl groups mentioned herein may be optionally substituted with one, two, three, four or five substituents independently selected from the group consisting of: (1) C₁₋₇ acyl (e.g., carboxyaldehyde); (2) C₁₋₂₀ alkyl (e.g., C₁₋₆ alkyl, C₁₋₆ alkoxy-C₁₋₆ alkyl, C₁₋₆ alkylsulfinyl-C₁₋₆ alkyl, amino-C₁₋₆ alkyl, azido-C₁₋₆ alkyl, (carboxyaldehyde)-C₁₋₆ alkyl, halo-C₁₋₆ alkyl (e.g., perfluoroalkyl), hydroxy-C₁₋₆ alkyl, nitro-C₁₋₆ alkyl, or C₁₋₆ thioalkoxy-C₁₋₆ alkyl); (3) C₁₋₂₀ alkoxy (e.g., C₁₋₆ alkoxy, such as perfluoroalkoxy); (4) C₁₋₆ alkylsulfinyl; (5) C₆₋₁₀ aryl; (6) amino; (7) C₁₋₆ alk-C₆₋₁₀ aryl; (8) azido; (9) C₃₋₈ cycloalkyl; (10) C₁₋₆ alk-C₃₋₈ cycloalkyl; (11) halo; (12) C₁₋₁₂ heterocyclyl (e.g., C₂₋₁₂ heteroaryl); (13) (C₁₋₁₂ heterocyclyl)oxy; (14) hydroxy; (15) nitro; (16) C₁₋₂₀ thioalkoxy (e.g., C₁₋₆ thioalkoxy); (17) —(CH₂)_{q}CO₂R^{A′}, where q is an integer from zero to four, and R^{A′} is selected from the group consisting of (a) C₁₋₆ alkyl, (b) C₆₋₁₀ aryl, (c) hydrogen, and (d) C₁₋₆ alk-C₆₋₁₀ aryl; (18) —(CH₂)_{q}CONR^{B′}R^{C′}, where q is an integer from zero to four and where R^{B′} and R^{C′} are independently selected from the group consisting of (a) hydrogen, (b) C₁₋₆ alkyl, (c) C₆₋₁₀ aryl, and (d) C₁₋₆ alk-C₆₋₁₀ aryl; (19) —(CH₂)_{q}SO₂R^{D′}, where q is an integer from zero to four and where R^{D′} is selected from the group consisting of (a) C₁₋₆ alkyl, (b) C₆₋₁₀ aryl, and (c) C₁₋₆ alk-C₆₋₁₀ aryl; (20) —(CH₂)_{q}SO₂NR^{E′}R^{F′}, where q is an integer from zero to four and where each of R^{E′} and R^{F′}is, independently, selected from the group consisting of (a) hydrogen, (b) C₁₋₆ alkyl, (c) C₆₋₁₀ aryl, and (d) C₁₋₆ alk-C₆₋₁₀ aryl; (21) thiol; (22) C₆₋₁₀ aryloxy; (23) C₃₋₈ cycloalkoxy; (24) arylalkoxy; (25) C₁₋₆ alk-C₁₋₁₂ heterocyclyl (e.g., C₁₋₆ alk-C₁₋₁₂ heteroaryl); (26) oxo; (27) (C₁₋₁₂ heterocyclyl)imino; (28) C₂₋₂₀ alkenyl; and (29) C₂₋₂₀ alkynyl. In some embodiments, each of these groups can be further substituted as described herein. For example, the alkylene group of a C₁-alkaryl or a C₁-alkheterocyclyl can be further substituted with an oxo group to afford the respective aryloyl and (heterocyclyl)oyl substituent group.

[0821] The term “(heterocyclyl)imino,” as used herein, represents a heterocyclyl group, as defined herein, attached to the parent molecular group through an imino group. In some embodiments, the heterocyclyl group can be substituted with 1, 2, 3, or 4 substituent groups as defined herein.

[0822] The term “(heterocyclyl)oxy,” as used herein, represents a heterocyclyl group, as defined herein, attached to the parent molecular group through an oxygen atom. In some embodiments, the heterocyclyl group can be substituted with 1, 2, 3, or 4 substituent groups as defined herein.

[0823] The term “(heterocyclyl)oyl,” as used herein, represents a heterocyclyl group, as defined herein, attached to the parent molecular group through a carbonyl group. In some embodiments, the heterocyclyl group can be substituted with 1, 2, 3, or 4 substituent groups as defined herein.

[0824] The term “hydrocarbon,” as used herein, represents a group consisting only of carbon and hydrogen atoms.

[0825] The term “hydroxy,” as used herein, represents an —OH group.

[0826] The term “hydroxyalkenyl,” as used herein, represents an alkenyl group, as defined herein, substituted by one to three hydroxy groups, with the proviso that no more than one hydroxy group may be attached to a single carbon atom of the alkyl group, and is exemplified by dihydroxypropenyl, hydroxyisopentenyl, and the like.

[0827] The term “hydroxyalkyl,” as used herein, represents an alkyl group, as defined herein, substituted by one to three hydroxy groups, with the proviso that no more than one hydroxy group may be attached to a single carbon atom of the alkyl group, and is exemplified by hydroxymethyl, dihydroxypropyl, and the like.

[0828] The term “isomer,” as used herein, means any tautomer, stereoisomer, enantiomer, or diastereomer of any compound of the invention. It is recognized that the compounds of the invention can have one or more chiral centers and/or double bonds and, therefore, exist as stereoisomers, such as double-bond isomers (i.e., geometric E/Z isomers) or diastereomers (e.g., enantiomers (i.e., (+) or (−)) or cis/trans isomers). According to the invention, the chemical structures depicted herein, and therefore the compounds of the invention, encompass all of the corresponding stereoisomers, that is, both the stereomerically pure form (e.g., geometrically pure, enantiomerically pure, or diastereomerically pure) and enantiomeric and stereoisomeric mixtures, e.g., racemates. Enantiomeric and stereoisomeric mixtures of compounds of the invention can typically be resolved into their component enantiomers or stereoisomers by well-known methods, such as chiral-phase gas chromatography, chiral-phase high performance liquid chromatography, crystallizing the compound as a chiral salt complex, or crystallizing the compound in a chiral solvent. Enantiomers and stereoisomers can also be obtained from stereomerically or enantiomerically pure intermediates, reagents, and catalysts by well-known asymmetric synthetic methods.

[0829] The term “N-protected amino,” as used herein, refers to an amino group, as defined herein, to which is attached one or two N-protecting groups, as defined herein.

[0830] The term “N-protecting group,” as used herein, represents those groups intended to protect an amino group against undesirable reactions during synthetic procedures. Commonly used N-protecting groups are disclosed in Greene, “Protective Groups in Organic Synthesis,” 3^{rd} Edition (John Wiley & Sons, New York, 1999), which is incorporated herein by reference. N-protecting groups include acyl, aryloyl, or carbamyl groups such as formyl, acetyl, propionyl, pivaloyl, t-butylacetyl, 2-chloroacetyl, 2-bromoacetyl, trifluoroacetyl, trichloroacetyl, phthalyl, o-nitrophenoxyacetyl, α-chlorobutyryl, benzoyl, 4-chlorobenzoyl, 4-bromobenzoyl, 4-nitrobenzoyl, and chiral auxiliaries such as protected or unprotected D, L or D, L-amino acids such as alanine, leucine, phenylalanine, and the like; sulfonyl-containing groups such as benzenesulfonyl, p-toluenesulfonyl, and the like; carbamate forming groups such as benzyloxycarbonyl, p-chlorobenzyloxycarbonyl, p-methoxybenzyloxycarbonyl, p-nitrobenzyloxycarbonyl, 2-nitrobenzyloxycarbonyl, p-bromobenzyloxycarbonyl, 3,4-dimethoxybenzyloxycarbonyl, 3,5-dimethoxybenzyloxycarbonyl, 2,4-dimethoxybenzyloxycarbonyl, 4-methoxybenzyloxycarbonyl, 2-nitro-4,5-dimethoxybenzyloxycarbonyl, 3,4,5-trimethoxybenzyloxycarbonyl, 1-(p-biphenylyl)-1-methylethoxycarbonyl, α,α-dimethyl-3,5-dimethoxybenzyloxycarbonyl, benzhydryloxy carbonyl, t-butyloxycarbonyl, diisopropylmethoxycarbonyl, isopropyloxycarbonyl, ethoxycarbonyl, methoxycarbonyl, allyloxycarbonyl, 2,2,2,-trichloroethoxycarbonyl, phenoxycarbonyl, 4-nitrophenoxy carbonyl, fluorenyl-9-methoxycarbonyl, cyclopentyloxycarbonyl, adamantyloxycarbonyl, cyclohexyloxycarbonyl, phenylthiocarbonyl, and the like, alkaryl groups such as benzyl, triphenylmethyl, benzyloxymethyl, and the like and silyl groups, such as trimethylsilyl, and the like. Preferred N-protecting groups are formyl, acetyl, benzoyl, pivaloyl, t-butylacetyl, alanyl, phenylsulfonyl, benzyl, t-butyloxycarbonyl (Boc), and benzyloxycarbonyl (Cbz).

[0831] The term “nitro,” as used herein, represents an —NO₂ group.

[0832] The term “oxo” as used herein, represents ═O.

[0833] The term “perfluoroalkyl,” as used herein, represents an alkyl group, as defined herein, where each hydrogen radical bound to the alkyl group has been replaced by a fluoride radical. Perfluoroalkyl groups are exemplified by trifluoromethyl, pentafluoroethyl, and the like.

[0834] The term “perfluoroalkoxy,” as used herein, represents an alkoxy group, as defined herein, where each hydrogen radical bound to the alkoxy group has been replaced by a fluoride radical. Perfluoroalkoxy groups are exemplified by trifluoromethoxy, pentafluoroethoxy, and the like.

[0835] The term “spirocyclyl,” as used herein, represents a C₂₋₇ alkylene diradical, both ends of which are bonded to the same carbon atom of the parent group to form a spirocyclic group, and also a C₁₋₆ heteroalkylene diradical, both ends of which are bonded to the same atom. The heteroalkylene radical forming the spirocyclyl group can containing one, two, three, or four heteroatoms independently selected from the group consisting of nitrogen, oxygen, and sulfur. In some embodiments, the spirocyclyl group includes one to seven carbons, excluding the carbon atom to which the diradical is attached. The spirocyclyl groups of the invention may be optionally substituted with 1, 2, 3, or 4 substituents provided herein as optional substituents for cycloalkyl and/or heterocyclyl groups.

[0836] The term “stereoisomer,” as used herein, refers to all possible different isomeric as well as conformational forms which a compound may possess (e.g., a compound of any formula described herein), in particular all possible stereochemically and conformationally isomeric forms, all diastereomers, enantiomers and/or conformers of the basic molecular structure. Some compounds of the present invention may exist in different tautomeric forms, all of the latter being included within the scope of the present invention.

[0837] The term “sulfoalkyl,” as used herein, represents an alkyl group, as defined herein, substituted by a sulfo group of —SO₃H. In some embodiments, the alkyl group can be further substituted with 1, 2, 3, or 4 substituent groups as described herein.

[0838] The term “sulfonyl,” as used herein, represents an —S(O)₂—group.

[0839] The term “thioalkaryl,” as used herein, represents a chemical substituent of formula —SR, where R is an alkaryl group. In some embodiments, the alkaryl group can be further substituted with 1, 2, 3, or 4 substituent groups as described herein.

[0840] The term “thioalkheterocyclyl,” as used herein, represents a chemical substituent of formula —SR, where R is an alkheterocyclyl group. In some embodiments, the alkheterocyclyl group can be further substituted with 1, 2, 3, or 4 substituent groups as described herein.

[0841] The term “thioalkoxy,” as used herein, represents a chemical substituent of formula —SR, where R is an alkyl group, as defined herein. In some embodiments, the alkyl group can be further substituted with 1, 2, 3, or 4 substituent groups as described herein.

[0842] The term “thiol” represents an —SH group.

[0843] Compound: As used herein, the term “compound,” as used herein, is meant to include all stereoisomers, geometric isomers, tautomers, and isotopes of the structures depicted.

[0844] The compounds described herein can be asymmetric (e.g., having one or more stereocenters). All stereoisomers, such as enantiomers and diastereomers, are intended unless otherwise indicated. Compounds of the present disclosure that contain asymmetrically substituted carbon atoms can be isolated in optically active or racemic forms. Methods on how to prepare optically active forms from optically active starting materials are known in the art, such as by resolution of racemic mixtures or by stereoselective synthesis. Many geometric isomers of olefins, C═N double bonds, and the like can also be present in the compounds described herein, and all such stable isomers are contemplated in the present disclosure. Cis and trans geometric isomers of the compounds of the present disclosure are described and may be isolated as a mixture of isomers or as separated isomeric forms.

[0845] Compounds of the present disclosure also include tautomeric forms. Tautomeric forms result from the swapping of a single bond with an adjacent double bond together with the concomitant migration of a proton. Tautomeric forms include prototropic tautomers which are isomeric protonation states having the same empirical formula and total charge. Example prototropic tautomers include ketone-enol pairs, amide-imidic acid pairs, lactam-lactim pairs, amide-imidic acid pairs, enamine-imine pairs, and annular forms where a proton can occupy two or more positions of a heterocyclic system, for example, 1H- and 3H-imidazole, 1H-, 2H- and 4H-1,2,4-triazole, 1H- and 2H-isoindole, and 1H- and 2H-pyrazole. Tautomeric forms can be in equilibrium or sterically locked into one form by appropriate substitution.

[0846] Compounds of the present disclosure also include all of the isotopes of the atoms occurring in the intermediate or final compounds. “Isotopes” refers to atoms having the same atomic number but different mass numbers resulting from a different number of neutrons in the nuclei. For example, isotopes of hydrogen include tritium and deuterium.

[0847] The compounds and salts of the present disclosure can be prepared in combination with solvent or water molecules to form solvates and hydrates by routine methods.

[0848] Conserved: As used herein, the term “conserved” refers to nucleotides or amino acid residues of a polynucleotide sequence or polypeptide sequence, respectively, that are those that occur unaltered in the same position of two or more sequences being compared. Nucleotides or amino acids that are relatively conserved are those that are conserved amongst more related sequences than nucleotides or amino acids appearing elsewhere in the sequences.

[0849] In some embodiments, two or more sequences are said to be “completely conserved” if they are 100% identical to one another. In some embodiments, two or more sequences are said to be “highly conserved” if they are at least 70% identical, at least 80% identical, at least 90% identical, or at least 95% identical to one another. In some embodiments, two or more sequences are said to be “highly conserved” if they are about 70% identical, about 80% identical, about 90% identical, about 95%, about 98%, or about 99% identical to one another. In some embodiments, two or more sequences are said to be “conserved” if they are at least 30% identical, at least 40% identical, at least 50% identical, at least 60% identical, at least 70% identical, at least 80% identical, at least 90% identical, or at least 95% identical to one another. In some embodiments, two or more sequences are said to be “conserved” if they are about 30% identical, about 40% identical, about 50% identical, about 60% identical, about 70% identical, about 80% identical, about 90% identical, about 95% identical, about 98% identical, or about 99% identical to one another. Conservation of sequence may apply to the entire length of an oligonucleotide or polypeptide or may apply to a portion, region or feature thereof. Conservation of sequence may apply to the entire length of an oligonucleotide or polypeptide or may apply to a portion, region or feature thereof.

[0850] Delivery: As used herein, “delivery” refers to the act or manner of delivering a compound, substance, entity, moiety, cargo or payload.

[0851] Delivery Agent: As used herein, “delivery agent” refers to any substance which facilitates, at least in part, the in vivo delivery of a modified nucleic acid to targeted cells.

[0852] Detectable label: As used herein, “detectable label” refers to one or more markers, signals, or moieties which are attached, incorporated or associated with another entity that is readily detected by methods known in the art including radiography, fluorescence, chemiluminescence, enzymatic activity, absorbance and the like. Detectable labels include radioisotopes, fluorophores, chromophores, enzymes, dyes, metal ions, ligands such as biotin, avidin, streptavidin and haptens, quantum dots, and the like. Detectable labels may be located at any position in the peptides or proteins disclosed herein. They may be within the amino acids, the peptides, or proteins, or located at the N- or C—termini.

[0853] Device: As used herein, the term “device” means a piece of equipment designed to serve a special purpose. The device may comprise many features such as, but not limited to, components, electrical (e.g., wiring and circuits), storage modules and analysis modules.

[0854] Disease: As used herein, the term “disease” refers to an abnormal condition affecting the body of an organism often showing specific bodily symptoms.

[0855] Disorder: As used herein, the term “disorder, “refers to a disruption of or an interference with normal functions or established systems of the body.

[0856] Digest: As used herein, the term “digest” means to break apart into smaller pieces or components. When referring to polypeptides or proteins, digestion results in the production of peptides.

[0857] Encoded protein cleavage signal: As used herein, “encoded protein cleavage signal” refers to the nucleotide sequence which encodes a protein cleavage signal.

[0858] Engineered: As used herein, embodiments of the invention are “engineered” when they are designed to have a feature or property, whether structural or chemical, that varies from a starting point, wild type or native molecule.

[0859] Exosome: As used herein, “exosome” is a vesicle secreted by mammalian cells or a complex involved in RNA degradation.

[0860] Expression: As used herein, “expression” of a nucleic acid sequence refers to one or more of the following events: (1) production of an RNA template from a DNA sequence (e.g., by transcription); (2) processing of an RNA transcript (e.g., by splicing, editing, 5′ cap formation, and/or 3′ end processing); (3) translation of an RNA into a polypeptide or protein; and (4) post-translational modification of a polypeptide or protein.

[0861] Feature: As used herein, a “feature” refers to a characteristic, a property, or a distinctive element.

[0862] Formulation: As used herein, a “formulation” includes at least a modified nucleic acid and a delivery agent.

[0863] Fragment: A “fragment,” as used herein, refers to a portion. For example, fragments of proteins may comprise polypeptides obtained by digesting full-length protein isolated from cultured cells.

[0864] Functional: As used herein, a “functional” biological molecule is a biological molecule in a form in which it exhibits a property and/or activity by which it is characterized.

[0865] Heterologous: As used herein, the term “heterologous” in reference to an untranslated region such as a 5′UTR or 3′UTR means a region of nucleic acid, particularly untranslated nucleic acid which is not naturally found with the coding region encoded on the same or instant polynucleotide, primary construct or mmRNA. Homologous UTRs for example would represent those UTRs which are naturally found associated with the coding region of the mRNA, such as the wild type UTR.

[0866] Homology: As used herein, the term “homology” refers to the overall relatedness between polymeric molecules, e.g. between nucleic acid molecules (e.g. DNA molecules and/or RNA molecules) and/or between polypeptide molecules. In some embodiments, polymeric molecules are considered to be “homologous” to one another if their sequences are at least 25%, at least 30%, at least 35%, at least 40%, at least 45%, at least 50%, at least 55%, at least 60%, at least 65%, at least 70%, at least 75%, at least 80%, at least 85%, at least 90%, at least 95%, or at least 99% identical. In some embodiments, polymeric molecules are considered to be “homologous” to one another if their sequences are at least 25%, at least 30%, at least 35%, at least 40%, at least 45%, at least 50%, at least 55%, at least 60%, at least 65%, at least 70%, at least 75%, at least 80%, at least 85%, at least 90%, at least 95%, or at least 99% similar. The term “homologous” necessarily refers to a comparison between at least two sequences (polynucleotide or polypeptide sequences).

[0867] In accordance with the invention, two polynucleotide sequences are considered to be homologous if the polypeptides they encode are at least about 50% identical, at least about 60% identical, at least about 70% identical, at least about 80% identical, or at least about 90% identical for at least one stretch of at least about 20 amino acids.

[0868] In some embodiments, homologous polynucleotide sequences are characterized by the ability to encode a stretch of at least 4-5 uniquely specified amino acids. For polynucleotide sequences less than 60 nucleotides in length, homology is determined by the ability to encode a stretch of at least 4-5 uniquely specified amino acids. In accordance with the invention, two protein sequences are considered to be homologous if the proteins are at least about 50% identical, at least about 60% identical, at least about 70% identical, at least about 80% identical, or at least about 90% identical for at least one stretch of at least about 20 amino acids.

[0869] Identity: As used herein, the term “identity” refers to the overall relatedness between polymeric molecules, e.g., between oligonucleotide molecules (e.g. DNA molecules and/or RNA molecules) and/or between polypeptide molecules. Calculation of the percent identity of two polynucleotide sequences, for example, can be performed by aligning the two sequences for optimal comparison purposes (e.g., gaps can be introduced in one or both of a first and a second nucleic acid sequences for optimal alignment and non-identical sequences can be disregarded for comparison purposes). In certain embodiments, the length of a sequence aligned for comparison purposes is at least 30%, at least 40%, at least 50%, at least 60%, at least 70%, at least 80%, at least 90%, at least 95%, or 100% of the length of the reference sequence. The nucleotides at corresponding nucleotide positions are then compared. When a position in the first sequence is occupied by the same nucleotide as the corresponding position in the second sequence, then the molecules are identical at that position. The percent identity between the two sequences is a function of the number of identical positions shared by the sequences, taking into account the number of gaps, and the length of each gap, which needs to be introduced for optimal alignment of the two sequences. The comparison of sequences and determination of percent identity between two sequences can be accomplished using a mathematical algorithm. For example, the percent identity between two nucleotide sequences can be determined using methods such as those described in Computational Molecular Biology, Lesk, A. M., ed., Oxford University Press, New York, 1988; Biocomputing: Informatics and Genome Projects, Smith, D. W., ed., Academic Press, New York, 1993; Sequence Analysis in Molecular Biology, von Heinje, G., Academic Press, 1987; Computer Analysis of Sequence Data, Part I, Griffin, A. M., and Griffin, H. G., eds., Humana Press, New Jersey, 1994; and Sequence Analysis Primer, Gribskov, M. and Devereux, J., eds., M Stockton Press, New York, 1991; each of which is incorporated herein by reference. For example, the percent identity between two nucleotide sequences can be determined using the algorithm of Meyers and Miller (CABIOS, 1989, 4:11-17), which has been incorporated into the ALIGN program (version 2.0) using a PAM120 weight residue table, a gap length penalty of 12 and a gap penalty of 4. The percent identity between two nucleotide sequences can, alternatively, be determined using the GAP program in the GCG software package using an NWSgapdna.CMP matrix. Methods commonly employed to determine percent identity between sequences include, but are not limited to those disclosed in Carillo, H., and Lipman, D., SIAM J Applied Math., 48:1073 (1988); incorporated herein by reference. Techniques for determining identity are codified in publicly available computer programs. Exemplary computer software to determine homology between two sequences include, but are not limited to, GCG program package, Devereux, J., et al., Nucleic Acids Research, 12(1), 387 (1984)), BLASTP, BLASTN, and FASTA Atschul, S. F. et al., J. Molec. Biol., 215, 403 (1990)).

[0870] Inhibit expression of a gene: As used herein, the phrase “inhibit expression of a gene” means to cause a reduction in the amount of an expression product of the gene. The expression product can be an RNA transcribed from the gene (e.g., an mRNA) or a polypeptide translated from an mRNA transcribed from the gene. Typically a reduction in the level of an mRNA results in a reduction in the level of a polypeptide translated therefrom. The level of expression may be determined using standard techniques for measuring mRNA or protein.

[0871] In vitro: As used herein, the term “in vitro” refers to events that occur in an artificial environment, e.g., in a test tube or reaction vessel, in cell culture, in a Petri dish, etc., rather than within an organism (e.g., animal, plant, or microbe).

[0872] In vivo: As used herein, the term “in vivo” refers to events that occur within an organism (e.g., animal, plant, or microbe or cell or tissue thereof).

[0873] Isolated: As used herein, the term “isolated” refers to a substance or entity that has been separated from at least some of the components with which it was associated (whether in nature or in an experimental setting). Isolated substances may have varying levels of purity in reference to the substances from which they have been associated. Isolated substances and/or entities may be separated from at least about 10%, about 20%, about 30%, about 40%, about 50%, about 60%, about 70%, about 80%, about 90%, or more of the other components with which they were initially associated. In some embodiments, isolated agents are more than about 80%, about 85%, about 90%, about 91%, about 92%, about 93%, about 94%, about 95%, about 96%, about 97%, about 98%, about 99%, or more than about 99% pure. As used herein, a substance is “pure” if it is substantially free of other components. Substantially isolated: By “substantially isolated” is meant that the compound is substantially separated from the environment in which it was formed or detected. Partial separation can include, for example, a composition enriched in the compound of the present disclosure. Substantial separation can include compositions containing at least about 50%, at least about 60%, at least about 70%, at least about 80%, at least about 90%, at least about 95%, at least about 97%, or at least about 99% by weight of the compound of the present disclosure, or salt thereof. Methods for isolating compounds and their salts are routine in the art.

[0874] Linker: As used herein, a linker refers to a group of atoms, e.g., 10-1,000 atoms, and can be comprised of the atoms or groups such as, but not limited to, carbon, amino, alkylamino, oxygen, sulfur, sulfoxide, sulfonyl, carbonyl, and imine. The linker can be attached to a modified nucleoside or nucleotide on the nucleobase or sugar moiety at a first end, and to a payload, e.g., a detectable or therapeutic agent, at a second end. The linker may be of sufficient length as to not interfere with incorporation into a nucleic acid sequence. The linker can be used for any useful purpose, such as to form modified mRNA multimers (e.g., through linkage of two or more modified nucleic acids) or modified mRNA conjugates, as well as to administer a payload, as described herein. Examples of chemical groups that can be incorporated into the linker include, but are not limited to, alkyl, alkenyl, alkynyl, amido, amino, ether, thioether, ester, alkylene, heteroalkylene, aryl, or heterocyclyl, each of which can be optionally substituted, as described herein. Examples of linkers include, but are not limited to, unsaturated alkanes, polyethylene glycols (e.g., ethylene or propylene glycol monomeric units, e.g., diethylene glycol, dipropylene glycol, triethylene glycol, tripropylene glycol, tetraethylene glycol, or tetraethylene glycol), and dextran polymers, Other examples include, but are not limited to, cleavable moieties within the linker, such as, for example, a disulfide bond (—S—S—) or an azo bond (—N═N—), which can be cleaved using a reducing agent or photolysis. Non-limiting examples of a selectively cleavable bond include an amido bond can be cleaved for example by the use of tris(2-carboxyethyl)phosphine (TCEP), or other reducing agents, and/or photolysis, as well as an ester bond can be cleaved for example by acidic or basic hydrolysis.

[0875] Modified: As used herein “modified” refers to a changed state or structure of a molecule of the invention. Molecules may be modified in many ways including chemically, structurally, and functionally. In one embodiment, the mRNA molecules of the present invention are modified by the introduction of non-natural nucleosides and/or nucleotides.

[0876] Naturally occurring: As used herein, “naturally occurring” means existing in nature without artificial aid.

[0877] Open reading frame: As used herein, “open reading frame” or “ORF” refers to a sequence which does not contain a stop codon in a given reading frame.

[0878] Operably linked: As used herein, the phrase “operably linked” refers to a functional connection between two or more molecules, constructs, transcripts, entities, moieties or the like.

[0879] Patient: As used herein, “patient” refers to a subject who may seek or be in need of treatment, requires treatment, is receiving treatment, will receive treatment, or a subject who is under care by a trained professional for a particular disease or condition.

[0880] Optionally substituted: Herein a phrase of the form “optionally substituted X” (e.g., optionally substituted alkyl) is intended to be equivalent to “X, wherein X is optionally substituted” (e.g., “alkyl, wherein said alkyl is optionally substituted”). It is not intended to mean that the feature “X” (e.g. alkyl) per se is optional. Peptide: As used herein, “peptide” is less than or equal to 50 amino acids long, e.g., about 5, 10, 15, 20, 25, 30, 35, 40, 45, or 50 amino acids long.

[0881] Peptide: As used herein, “peptide” is less than or equal to 50 amino acids long, e.g., about 5, 10, 15, 20, 25, 30, 35, 40, 45, or 50 amino acids long.

[0882] Pharmaceutical composition: The phrase “pharmaceutical composition” refers to a composition that alters the etiology of a disease, disorder and/or condition.

[0883] Pharmaceutically acceptable: The phrase “pharmaceutically acceptable” is employed herein to refer to those compounds, materials, compositions, and/or dosage forms which are, within the scope of sound medical judgment, suitable for use in contact with the tissues of human beings and animals without excessive toxicity, irritation, allergic response, or other problem or complication, commensurate with a reasonable benefit/risk ratio.

[0884] Pharmaceutically acceptable excipients: The phrase “pharmaceutically acceptable excipient,” as used herein, refers any ingredient other than the compounds described herein (for example, a vehicle capable of suspending or dissolving the active compound) and having the properties of being substantially nontoxic and non-inflammatory in a patient. Excipients may include, for example: antiadherents, antioxidants, binders, coatings, compression aids, disintegrants, dyes (colors), emollients, emulsifiers, fillers (diluents), film formers or coatings, flavors, fragrances, glidants (flow enhancers), lubricants, preservatives, printing inks, sorbents, suspensing or dispersing agents, sweeteners, and waters of hydration. Exemplary excipients include, but are not limited to: butylated hydroxytoluene (BHT), calcium carbonate, calcium phosphate (dibasic), calcium stearate, croscarmellose, crosslinked polyvinyl pyrrolidone, citric acid, crospovidone, cysteine, ethylcellulose, gelatin, hydroxypropyl cellulose, hydroxypropyl methylcellulose, lactose, magnesium stearate, maltitol, mannitol, methionine, methylcellulose, methyl paraben, microcrystalline cellulose, polyethylene glycol, polyvinyl pyrrolidone, povidone, pregelatinized starch, propyl paraben, retinyl palmitate, shellac, silicon dioxide, sodium carboxymethyl cellulose, sodium citrate, sodium starch glycolate, sorbitol, starch (corn), stearic acid, sucrose, talc, titanium dioxide, vitamin A, vitamin E, vitamin C, and xylitol.

[0885] Pharmaceutically acceptable salts: The present disclosure also includes pharmaceutically acceptable salts of the compounds described herein. As used herein, “pharmaceutically acceptable salts” refers to derivatives of the disclosed compounds wherein the parent compound is modified by converting an existing acid or base moiety to its salt form (e.g., by reacting the free base group with a suitable organic acid). Examples of pharmaceutically acceptable salts include, but are not limited to, mineral or organic acid salts of basic residues such as amines; alkali or organic salts of acidic residues such as carboxylic acids; and the like. Representative acid addition salts include acetate, adipate, alginate, ascorbate, aspartate, benzenesulfonate, benzoate, bisulfate, borate, butyrate, camphorate, camphorsulfonate, citrate, cyclopentanepropionate, digluconate, dodecylsulfate, ethanesulfonate, fumarate, glucoheptonate, glycerophosphate, hemisulfate, heptonate, hexanoate, hydrobromide, hydrochloride, hydroiodide, 2-hydroxy-ethanesulfonate, lactobionate, lactate, laurate, lauryl sulfate, malate, maleate, malonate, methanesulfonate, 2-naphthalenesulfonate, nicotinate, nitrate, oleate, oxalate, palmitate, pamoate, pectinate, persulfate, 3-phenylpropionate, phosphate, picrate, pivalate, propionate, stearate, succinate, sulfate, tartrate, thiocyanate, toluenesulfonate, undecanoate, valerate salts, and the like. Representative alkali or alkaline earth metal salts include sodium, lithium, potassium, calcium, magnesium, and the like, as well as nontoxic ammonium, quaternary ammonium, and amine cations, including, but not limited to ammonium, tetramethylammonium, tetraethylammonium, methylamine, dimethylamine, trimethylamine, triethylamine, ethylamine, and the like. The pharmaceutically acceptable salts of the present disclosure include the conventional non-toxic salts of the parent compound formed, for example, from non-toxic inorganic or organic acids. The pharmaceutically acceptable salts of the present disclosure can be synthesized from the parent compound which contains a basic or acidic moiety by conventional chemical methods. Generally, such salts can be prepared by reacting the free acid or base forms of these compounds with a stoichiometric amount of the appropriate base or acid in water or in an organic solvent, or in a mixture of the two; generally, nonaqueous media like ether, ethyl acetate, ethanol, isopropanol, or acetonitrile are preferred. Lists of suitable salts are found in Remington's Pharmaceutical Sciences, 17^{th} ed., Mack Publishing Company, Easton, Pa., 1985, p. 1418 and Journal of Pharmaceutical Science, 66, 2 (1977), each of which is incorporated herein by reference in its entirety.

[0886] Pharmacokinetic: As used herein, “pharmacokinetic” refers to any one or more properties of a molecule or compound as it relates to the determination of the fate of substances administered to a living organism. Pharmacokinetics is divided into several areas including the extent and rate of absorption, distribution, metabolism and excretion. This is commonly referred to as ADME where: (A) Absorption is the process of a substance entering the blood circulation; (D) Distribution is the dispersion or dissemination of substances throughout the fluids and tissues of the body; (M) Metabolism (or Biotransformation) is the irreversible transformation of parent compounds into daughter metabolites; and (E) Excretion (or Elimination) refers to the elimination of the substances from the body. In rare cases, some drugs irreversibly accumulate in body tissue.

[0887] Pharmaceutically acceptable solvate: The term “pharmaceutically acceptable solvate,” as used herein, means a compound of the invention wherein molecules of a suitable solvent are incorporated in the crystal lattice. A suitable solvent is physiologically tolerable at the dosage administered. For example, solvates may be prepared by crystallization, recrystallization, or precipitation from a solution that includes organic solvents, water, or a mixture thereof. Examples of suitable solvents are ethanol, water (for example, mono-, di-, and tri-hydrates), N-methylpyrrolidinone (NMP), dimethyl sulfoxide (DMSO), N,N′-dimethylformamide (DMF), N,N′-dimethylacetamide (DMAC), 1,3-dimethyl-2-imidazolidinone (DMEU), 1,3-dimethyl-3,4,5,6-tetrahydro-2-(1H)-pyrimidinone (DMPU), acetonitrile (ACN), propylene glycol, ethyl acetate, benzyl alcohol, 2-pyrrolidone, benzyl benzoate, and the like. When water is the solvent, the solvate is referred to as a “hydrate.”

[0888] Physicochemical: As used herein, “physicochemical” means of or relating to a physical and/or chemical property.

[0889] Preventing: As used herein, the term “preventing” refers to partially or completely delaying onset of an infection, disease, disorder and/or condition; partially or completely delaying onset of one or more symptoms, features, or clinical manifestations of a particular infection, disease, disorder, and/or condition; partially or completely delaying onset of one or more symptoms, features, or manifestations of a particular infection, disease, disorder, and/or condition; partially or completely delaying progression from an infection, a particular disease, disorder and/or condition; and/or decreasing the risk of developing pathology associated with the infection, the disease, disorder, and/or condition.

[0890] Prodrug: The present disclosure also includes prodrugs of the compounds described herein. As used herein, “prodrugs” refer to any substance, molecule or entity which is in a form predicate for that substance, molecule or entity to act as a therapeutic upon chemical or physical alteration. Prodrugs may by covalently bonded or sequestested in some way and which release or are converted into the active drug moiety prior to, upon or after administered to a mammalian subject. Prodrugs can be prepared by modifying functional groups present in the compounds in such a way that the modifications are cleaved, either in routine manipulation or in vivo, to the parent compounds. Prodrugs include compounds wherein hydroxyl, amino, sulfhydryl, or carboxyl groups are bonded to any group that, when administered to a mammalian subject, cleaves to form a free hydroxyl, amino, sulfhydryl, or carboxyl group respectively. Preparation and use of prodrugs is discussed in T. Higuchi and V. Stella, “Pro-drugs as Novel Delivery Systems,” Vol. 14 of the A.C.S. Symposium Series, and in Bioreversible Carriers in Drug Design, ed. Edward B. Roche, American Pharmaceutical Association and Pergamon Press, 1987, both of which are hereby incorporated by reference in their entirety.

[0891] Protein cleavage site: As used herein, “protein cleavage site” refers to a site where controlled cleavage of the amino acid chain can be accomplished by chemical, enzymatic or photochemical means.

[0892] Protein cleavage signal: As used herein “protein cleavage signal” refers to at least one amino acid that flags or marks a polypeptide for cleavage.

[0893] Protein of interest: As used herein, the terms “proteins of interest” or “desired proteins” include those provided herein and fragments, mutants, variants, and alterations thereof.

[0894] Proximal: As used herein, the term “proximal” means situated nearer to the center or to a point or region of interest.

[0895] Pseudouridine: As used herein, pseudouridine refers to the C-glycoside isomer of the nucleoside uridine. A “pseudouridine analog” is any modification, variant, isoform or derivative of pseudouridine. For example, pseudouridine analogs include but are not limited to 1-carboxymethyl-pseudouridine, 1-propynyl-pseudouridine, 1-taurinomethyl-pseudouridine, 1-taurinomethyl-4-thio-pseudouridine, 1-methyl-pseudouridine (m¹ψ), 1-methyl-4-thio-pseudouridine (m¹s⁴W), 4-thio-1-methyl-pseudouridine, 3-methyl-pseudouridine (m³ψ), 2-thio-1-methyl-pseudouridine, 1-methyl-1-deaza-pseudouridine, 2-thio-1-methyl-1-deaza-pseudouridine, dihydropseudouridine, 2-thio-dihydropseudouridine, 2-methoxyuridine, 2-methoxy-4-thio-uridine, 4-methoxy-pseudouridine, 4-methoxy-2-thio-pseudouridine, N1-methyl-pseudouridine, 1-methyl-3-(3-amino-3-carboxypropyl)pseudouridine (acp³ψ), and 2′-O-methyl-pseudouridine (ψm).

[0896] Purified: As used herein, “purify,” “purified,” “purification” means to make substantially pure or clear from unwanted components, material defilement, admixture or imperfection.

[0897] Reducing the effect: As used herein, the phrase “reducing the effect” when referring to symptoms, means reducing, eliminating or alleviating the symptom in the subject. It does not necessarily mean that the symptom will, in fact, be completely eliminated, reduced or alleviated.

[0898] Sample: As used herein, the term “sample” or “biological sample” refers to a subset of its tissues, cells or component parts (e.g. body fluids, including but not limited to blood, mucus, lymphatic fluid, synovial fluid, cerebrospinal fluid, saliva, amniotic fluid, amniotic cord blood, urine, vaginal fluid and semen). A sample further may include a homogenate, lysate or extract prepared from a whole organism or a subset of its tissues, cells or component parts, or a fraction or portion thereof, including but not limited to, for example, plasma, serum, spinal fluid, lymph fluid, the external sections of the skin, respiratory, intestinal, and genitourinary tracts, tears, saliva, milk, blood cells, tumors, organs. A sample further refers to a medium, such as a nutrient broth or gel, which may contain cellular components, such as proteins or nucleic acid molecule.

[0899] Sample: As used herein, the term “sample” or “biological sample” refers to a subset of its tissues, cells or component parts (e.g. body fluids, including but not limited to blood, mucus, lymphatic fluid, synovial fluid, cerebrospinal fluid, saliva, amniotic fluid, amniotic cord blood, urine, vaginal fluid and semen). A sample further may include a homogenate, lysate or extract prepared from a whole organism or a subset of its tissues, cells or component parts, or a fraction or portion thereof, including but not limited to, for example, plasma, serum, spinal fluid, lymph fluid, the external sections of the skin, respiratory, intestinal, and genitourinary tracts, tears, saliva, milk, blood cells, tumors, organs. A sample further refers to a medium, such as a nutrient broth or gel, which may contain cellular components, such as proteins or nucleic acid molecule.

[0900] Seed: As used herein with respect to micro RNA (miRNA), a miRNA “seed” is a sequence with nucleotide identity at positions 2-8 of the mature miRNA. In one embodiment, a miRNA seed comprises positions 2-7 of the mature miRNA.

[0901] Side effect: As used herein, the phrase “side effect” refers to a secondary effect of treatment.

[0902] Signal Peptide Sequences: As used herein, the phrase “signal peptide sequences” refers to a sequence which can direct the transport or localization of a protein.

[0903] Similarity: As used herein, the term “similarity” refers to the overall relatedness between polymeric molecules, e.g. between polynucleotide molecules (e.g. DNA molecules and/or RNA molecules) and/or between polypeptide molecules. Calculation of percent similarity of polymeric molecules to one another can be performed in the same manner as a calculation of percent identity, except that calculation of percent similarity takes into account conservative substitutions as is understood in the art.

[0904] Split dose: As used herein, a “split dose” is the division of single unit dose or total daily dose into two or more doses.

[0905] Stable: As used herein “stable” refers to a compound that is sufficiently robust to survive isolation to a useful degree of purity from a reaction mixture, and preferably capable of formulation into an efficacious therapeutic agent.

[0906] Stabilized: As used herein, the term “stabilize”, “stabilized,” “stabilized region” means to make or become stable.

[0907] Subject: As used herein, the term “subject” or “patient” refers to any organism to which a composition in accordance with the invention may be administered, e.g., for experimental, diagnostic, prophylactic, and/or therapeutic purposes. Typical subjects include animals (e.g., mammals such as mice, rats, rabbits, non-human primates, and humans) and/or plants.

[0908] Substantially: As used herein, the term “substantially” refers to the qualitative condition of exhibiting total or near-total extent or degree of a characteristic or property of interest. One of ordinary skill in the biological arts will understand that biological and chemical phenomena rarely, if ever, go to completion and/or proceed to completeness or achieve or avoid an absolute result. The term “substantially” is therefore used herein to capture the potential lack of completeness inherent in many biological and chemical phenomena.

[0909] Substantially equal: As used herein as it relates to time differences between doses, the term means plus/minus 2%.

[0910] Substantially simultaneously: As used herein and as it relates to plurality of doses, the term means within 15 seconds.

[0911] Suffering from: An individual who is “suffering from” a disease, disorder, and/or condition has been diagnosed with or displays one or more symptoms of a disease, disorder, and/or condition.

[0912] Susceptible to: An individual who is “susceptible to” a disease, disorder, and/or condition has not been diagnosed with and/or may not exhibit symptoms of the disease, disorder, and/or condition but harbors a propensity to develop a disease or its symptoms. In some embodiments, an individual who is susceptible to a disease, disorder, and/or condition (for example, cancer) may be characterized by one or more of the following: (1) a genetic mutation associated with development of the disease, disorder, and/or condition; (2) a genetic polymorphism associated with development of the disease, disorder, and/or condition; (3) increased and/or decreased expression and/or activity of a protein and/or nucleic acid associated with the disease, disorder, and/or condition; (4) habits and/or lifestyles associated with development of the disease, disorder, and/or condition; (5) a family history of the disease, disorder, and/or condition; and (6) exposure to and/or infection with a microbe associated with development of the disease, disorder, and/or condition. In some embodiments, an individual who is susceptible to a disease, disorder, and/or condition will develop the disease, disorder, and/or condition. In some embodiments, an individual who is susceptible to a disease, disorder, and/or condition will not develop the disease, disorder, and/or condition.

[0913] Symptom: As used herein, the term “symptom” is a signal of a disease, disorder and/or condition. For example, symptoms may be felt or noticed by the subject who has them but may not be easily accessed by looking at a subject's outward appearance or behaviors. Examples of symptoms include, but are not limited to, weakness, aches and pains, fever, fatigue, weight loss, blood clots, increased blood calcium levels, low white blood cell count, short of breath, dizziness, headaches, hyperpigmentation, jaundice, erthema, pruritis, excessive hair growth, change in bowel habits, change in bladder function, long-lasting sores, white patches inside the mouth, white spots on the tongue, unusual bleeding or discharge, thickening or lump on parts of the body, indigestion, trouble swallowing, changes in warts or moles, change in new skin and nagging cough or hoarseness.

[0914] Synthetic: The term “synthetic” means produced, prepared, and/or manufactured by the hand of man. Synthesis of polynucleotides or polypeptides or other molecules of the present invention may be chemical or enzymatic.

[0915] Targeted Cells: As used herein, “targeted cells” refers to any one or more cells of interest. The cells may be found in vitro, in vivo, in situ or in the tissue or organ of an organism. The organism may be an animal, preferably a mammal, more preferably a human and most preferably a patient.

[0916] Terminal region: As used herein, the term “terminal region” refers to a region on the 5′ or 3′ end of a region of linked nucleosides encoding a polypeptide of interest or coding region.

[0917] Terminally optimized: The term “terminally optimized” when referring to nucleic acids means the terminal regions of the nucleic acid are improved over the native terminal regions.

[0918] Therapeutic Agent: The term “therapeutic agent” refers to any agent that, when administered to a subject, has a therapeutic, diagnostic, and/or prophylactic effect and/or elicits a desired biological and/or pharmacological effect.

[0919] Therapeutically effective amount: As used herein, the term “therapeutically effective amount” means an amount of an agent to be delivered (e.g., nucleic acid, drug, therapeutic agent, diagnostic agent, prophylactic agent, etc.) that is sufficient, when administered to a subject suffering from or susceptible to a disease, disorder, and/or condition, to treat, improve symptoms of, diagnose, prevent, and/or delay the onset of the disease, disorder, and/or condition.

[0920] Therapeutically effective outcome: As used herein, “therapeutically effective amount” means an amount of an agent to be delivered (e.g., nucleic acid, drug, therapeutic agent, diagnostic agent, prophylactic agent, etc.) that is sufficient, when administered to a subject suffering from or susceptible to a disease, disorder, and/or condition, to treat, improve symptoms of, diagnose, prevent, and/or delay the onset of the disease, disorder, and/or condition.

[0921] Total daily dose: As used herein, a “total daily dose” is an amount given or prescribed in 24 hr period. It may be administered as a single unit dose.

[0922] Transcription factor: As used herein, the term “transcription factor” refers to a DNA-binding protein that regulates transcription of DNA into RNA, for example, by activation or repression of transcription. Some transcription factors effect regulation of transcription alone, while others act in concert with other proteins. Some transcription factor can both activate and repress transcription under certain conditions. In general, transcription factors bind a specific target sequence or sequences highly similar to a specific consensus sequence in a regulatory region of a target gene. Transcription factors may regulate transcription of a target gene alone or in a complex with other molecules.

[0923] Treating: As used herein, the term “treating” refers to partially or completely alleviating, ameliorating, improving, relieving, delaying onset of, inhibiting progression of, reducing severity of, and/or reducing incidence of one or more symptoms or features of a particular disease, disorder, and/or condition. For example, “treating” cancer may refer to inhibiting survival, growth, and/or spread of a tumor. Treatment may be administered to a subject who does not exhibit signs of a disease, disorder, and/or condition and/or to a subject who exhibits only early signs of a disease, disorder, and/or condition for the purpose of decreasing the risk of developing pathology associated with the disease, disorder, and/or condition.

[0924] Unmodified: As used herein, “unmodified” refers to any substance, compound or molecule prior to being changed in any way. Unmodified may, but does not always, refer to the wild type or native form of a biomolecule. Molecules may undergo a series of modifications whereby each modified molecule may serve as the “unmodified” starting molecule for a subsequent modification.

### Equivalents and Scope

[0925] Those skilled in the art will recognize, or be able to ascertain using no more than routine experimentation, many equivalents to the specific embodiments in accordance with the invention described herein. The scope of the present invention is not intended to be limited to the above Description, but rather is as set forth in the appended claims.

[0926] In the claims, articles such as “a,” “an,” and “the” may mean one or more than one unless indicated to the contrary or otherwise evident from the context. Claims or descriptions that include “or” between one or more members of a group are considered satisfied if one, more than one, or all of the group members are present in, employed in, or otherwise relevant to a given product or process unless indicated to the contrary or otherwise evident from the context. The invention includes embodiments in which exactly one member of the group is present in, employed in, or otherwise relevant to a given product or process. The invention includes embodiments in which more than one, or all of the group members are present in, employed in, or otherwise relevant to a given product or process.

[0927] It is also noted that the term “comprising” is intended to be open and permits the inclusion of additional elements or steps.

[0928] Where ranges are given, endpoints are included. Furthermore, it is to be understood that unless otherwise indicated or otherwise evident from the context and understanding of one of ordinary skill in the art, values that are expressed as ranges can assume any specific value or subrange within the stated ranges in different embodiments of the invention, to the tenth of the unit of the lower limit of the range, unless the context clearly dictates otherwise.

[0929] In addition, it is to be understood that any particular embodiment of the present invention that falls within the prior art may be explicitly excluded from any one or more of the claims. Since such embodiments are deemed to be known to one of ordinary skill in the art, they may be excluded even if the exclusion is not set forth explicitly herein. Any particular embodiment of the compositions of the invention (e.g., any nucleic acid or protein encoded thereby; any method of production; any method of use; etc.) can be excluded from any one or more claims, for any reason, whether or not related to the existence of prior art.

### EXAMPLES

### Example 1. Modified mRNA Production

[0930] Modified mRNAs according to the invention are made using standard laboratory methods and materials.

[0931] The open reading frame with various upstream or downstream regions ((3-globin, tags, etc.) is ordered from DNA2.0 (Menlo Park, CA) and typically contains a multiple cloning site with XbaI recognition. Upon receipt of the construct, it is reconstituted and transformed into chemically competent E. coli. For the present invention, NEB DH5-alpha Competent E. coli are used. A typical clone map is shown in FIG. 3. Transformations are performed according to NEB instructions using 100 ng of plasmid. The protocol is as follows:
[0932] 1. Thaw a tube of NEB 5-alpha Competent E. coli cells on ice for 10 minutes.
[0933] 2. Add 1-5 μl containing 1 pg-100 ng of plasmid DNA to the cell mixture. Carefully flick the tube 4-5 times to mix cells and DNA. Do not vortex.
[0934] 3. Place the mixture on ice for 30 minutes. Do not mix.
[0935] 4. Heat shock at 42° C. for exactly 30 seconds. Do not mix.
[0936] 5. Place on ice for 5 minutes. Do not mix.
[0937] 6. Pipette 950 μl of room temperature SOC into the mixture.
[0938] 7. Place at 37° C. for 60 minutes. Shake vigorously (250 rpm) or rotate.
[0939] 8. Warm selection plates to 37° C.
[0940] 9. Mix the cells thoroughly by flicking the tube and inverting.
[0941] 10. Spread 50-100 μl of each dilution onto a selection plate and incubate overnight at 37° C. Alternatively, incubate at 30° C. for 24-36 hours or 25° C. for 48 hours.

[0942] A single colony is then used to inoculate 5 ml of LB growth media using the appropriate antibiotic and then allowed to grow (250 RPM, 37° C.) for 5 hours. This is then used to inoculate a 200 ml culture medium and allowed to grow overnight under the same conditions.

[0943] To isolate the plasmid (up to 850 pg), a maxi prep is performed using the Invitrogen PureLink™ HiPure Maxiprep Kit (Carlsbad, CA), following the manufacturer's instructions.

[0944] In order to generate cDNA for In Vitro Transcription (IVT), the plasmid is first linearized using a restriction enzyme such as XbaI. A typical restriction digest with XbaI will comprise the following: Plasmid 1.0 μg; 10× Buffer 1.0 μl; XbaI 1.5 μl; dH₂O

[0945] Up to 10 μl; incubated at 37° C. for 1 hr. If performing at lab scale (<5 pg), the reaction is cleaned up using Invitrogen's PureLink™ PCR Micro Kit (Carlsbad, CA) per manufacturer's instructions. Larger scale purifications may need to be done with a product that has a larger load capacity such as Invitrogen's standard PureLink PCR Kit (Carlsbad, CA). Following the cleanup, the linearized vector is quantified using the NanoDrop and analyzed to confirm linearization using agarose gel electrophoresis.

[0946] As a non-limiting example, G-CSF may represent the polypeptide of interest. Sequences used in the steps outlined in Examples 1-5 are shown in Table 16. It should be noted that the start codon (ATG) has been underlined in each sequence of Table 16.

TABLE 16
G-CSF Sequences

| SEQ | |
|---|---|
| ID | |
| NO | Description |
| 4255 | cDNAsequence: |
| | ATGGCTGGACCTGCCACCCAGAGCCCCATGAAGCTGATGGCCCTGCAG |
| | CTGCTGCTGTGGCACAGTGCACTCTGGACAGTGCAGGAAGCCACCCCC |
| | CTGGGCCCTGCCAGCTCCCTGCCCCAGAGCTTCCTGCTCAAGTGCTTAG |
| | AGCAAGTGAGGAAGATCCAGGGCGATGGCGCAGCGCTCCAGGAGAAG |
| | CTGTGTGCCACCTACAAGCTGTGCCACCCCGAGGAGCTGGTGCTGCTCG |
| | GACACTCTCTGGGCATCCCCTGGGCTCCCCTGAGCAGCTGCCCCAGCCA |
| | GGCCCTGCAGCTGGCAGGCTGCTTGAGCCAACTCCATAGCGGCCTTTTC |
| | CTCTACCAGGGGCTCCTGCAGGCCCTGGAAGGGATCTCCCCCGAGTTG |
| | GGTCCCACCTTGGACACACTGCAGCTGGACGTCGCCGACTTTGCCACCA |
| | CCATCTGGCAGCAGATGGAAGAACTGGGAATGGCCCCTGCCCTGCAGC |
| | CCACCCAGGGTGCCATGCCGGCCTTCGCCTCTGCTTTCCAGCGCCGGGC |
| | AGGAGGGGTCCTGGTTGCCTCCCATCTGCAGAGCTTCCTGGAGGTGTCG |
| | TACCGCGTTCTACGCCACCTTGCCCAGCCCTGA |
| 4256 | cDNA having T7 polymerase site, AfeI and Xba restriction site: |
| | TAATACGACTCACTATA |
| | GGGAAATAAGAGAGAAAAGAAGAGTAAGAAGAAATATAAGAGCCACC |
| | ATGGCTGGACCTGCCACCCAGAGCCCCATGAAGCTGATGGCCCTGCAG |
| | CTGCTGCTGTGGCACAGTGCACTCTGGACAGTGCAGGAAGCCACCCCC |
| | CTGGGCCCTGCCAGCTCCCTGCCCCAGAGCTTCCTGCTCAAGTGCTTAG |
| | AGCAAGTGAGGAAGATCCAGGGCGATGGCGCAGCGCTCCAGGAGAAG |
| | CTGTGTGCCACCTACAAGCTGTGCCACCCCGAGGAGCTGGTGCTGCTCG |
| | GACACTCTCTGGGCATCCCCTGGGCTCCCCTGAGCAGCTGCCCCAGCCA |
| | GGCCCTGCAGCTGGCAGGCTGCTTGAGCCAACTCCATAGCGGCCTTTTC |
| | CTCTACCAGGGGCTCCTGCAGGCCCTGGAAGGGATCTCCCCCGAGTTG |
| | GGTCCCACCTTGGACACACTGCAGCTGGACGTCGCCGACTTTGCCACCA |
| | CCATCTGGCAGCAGATGGAAGAACTGGGAATGGCCCCTGCCCTGCAGC |
| | CCACCCAGGGTGCCATGCCGGCCTTCGCCTCTGCTTTCCAGCGCCGGGC |
| | AGGAGGGGTCCTGGTTGCCTCCCATCTGCAGAGCTTCCTGGAGGTGTCG |
| | TACCGCGTTCTACGCCACCTTGCCCAGCCCTGA |
| | AGCGCTGCCTTCTGCGGGGCTTGCCTTCTGGCCATGCCCTTCTTCTCTCC |
| | CTTGCACCTGTACCTCTTGGTCTTTGAATAAAGCCTGAGTAGGAAGGCG |
| | GCCGCTCGAGCATGCATCTAGA |
| 4257 | Optimized sequence; containing T7 polymerase site, AfeI and |
| | Xba restriction site |
| | TAATACGACTCACTATA |
| | GGGAAATAAGAGAGAAAAGAAGAGTAAGAAGAAATATAAGAGCCACC |
| | ATGGCCGGTCCCGCGACCCAAAGCCCCATGAAACTTATGGCCCTGCAG |
| | TTGCTGCTTTGGCACTCGGCCCTCTGGACAGTCCAAGAAGCGACTCCTC |
| | TCGGACCTGCCTCATCGTTGCCGCAGTCATTCCTTTTGAAGTGTCTGGA |
| | GCAGGTGCGAAAGATTCAGGGCGATGGAGCCGCACTCCAAGAGAAGC |
| | TCTGCGCGACATACAAACTTTGCCATCCCGAGGAGCTCGTACTGCTCGG |
| | GCACAGCTTGGGGATTCCCTGGGCTCCTCTCTCGTCCTGTCCGTCGCAG |
| | GCTTTGCAGTTGGCAGGGTGCCTTTCCCAGCTCCACTCCGGTTTGTTCTT |
| | GTATCAGGGACTGCTGCAAGCCCTTGAGGGAATCTCGCCAGAATTGGG |
| | CCCGACGCTGGACACGTTGCAGCTCGACGTGGCGGATTTCGCAACAAC |
| | CATCTGGCAGCAGATGGAGGAACTGGGGATGGCACCCGCGCTGCAGCC |
| | CACGCAGGGGGCAATGCCGGCCTTTGCGTCCGCGTTTCAGCGCAGGGC |
| | GGGTGGAGTCCTCGTAGCGAGCCACCTTCAATCATTTTTGGAAGTCTCG |
| | TACCGGGTGCTGAGACATCTTGCGCAGCCGTGA |
| | AGCGCTGCCTTCTGCGGGGCTTGCCTTCTGGCCATGCCCTTCTTCTCTCC |
| | CTTGCACCTGTACCTCTTGGTCTTTGAATAAAGCCTGAGTAGGAAGGCG |
| | GCCGCTCGAGCATGCATCTAGA |
| 4258 | mRNA sequence (transcribed) |
| | GGGAAAUAAGAGAGAAAAGAAGAGUAAGAAGAAAUAUAAGAGCCACC |
| | AUGGCCGGUCCCGCGACCCAAAGCCCCAUGAAACUUAUGGCCCUGCA |
| | GUUGCUGCUUUGGCACUCGGCCCUCUGGACAGUCCAAGAAGCGACUC |
| | CUCUCGGACCUGCCUCAUCGUUGCCGCAGUCAUUCCUUUUGAAGUGU |
| | CUGGAGCAGGUGCGAAAGAUUCAGGGCGAUGGAGCCGCACUCCAAGA |
| | GAAGCUCUGCGCGACAUACAAACUUUGCCAUCCCGAGGAGCUCGUAC |
| | UGCUCGGGCACAGCUUGGGGAUUCCCUGGGCUCCUCUCUCGUCCUGU |
| | CCGUCGCAGGCUUUGCAGUUGGCAGGGUGCCUUUCCCAGCUCCACUC |
| | CGGUUUGUUCUUGUAUCAGGGACUGCUGCAAGCCCUUGAGGGAAUC |
| | UCGCCAGAAUUGGGCCCGACGCUGGACACGUUGCAGCUCGACGUGGC |
| | GGAUUUCGCAACAACCAUCUGGCAGCAGAUGGAGGAACUGGGGAUG |
| | GCACCCGCGCUGCAGCCCACGCAGGGGGCAAUGCCGGCCUUUGCGUC |
| | CGCGUUUCAGCGCAGGGCGGGUGGAGUCCUCGUAGCGAGCCACCUUC |
| | AAUCAUUUUUGGAAGUCUCGUACCGGGUGCUGAGACAUCUUGCGCA |
| | GCCGUGA |
| | AGCGCUGCCUUCUGCGGGGCUUGCCUUCUGGCCAUGCCCUUCUUCUC |
| | UCCCUUGCACCUGUACCUCUUGGUCUUUGAAUAAAGCCUGAGUAGGA |
| | AG |

### Example 2: PCR for cDNA Production

[0947] PCR procedures for the preparation of cDNA is performed using 2× KAPA HiFi™ HotStart ReadyMix by Kapa Biosystems (Woburn, MA). This system includes 2× KAPA ReadyMix 12.5 μl; Forward Primer (10 uM)_{0.75} μl; Reverse Primer (10 uM)_{0.75} μl; Template cDNA 100 ng; and dH₂O diluted to 25.0 a1. The reaction conditions are at 95° C. for 5 min. and 25 cycles of 98° C. 20 sec, then 58° C. 15 sec, then 72° C. 45 sec, then 72° C. 5 min. then 4° C. to termination.

[0948] The reverse primer of the instant invention incorporates a poly-T₁₂₀ for a poly-A120 in the mRNA. Other reverse primers with longer or shorter poly(T) tracts can be used to adjust the length of the poly(A) tail in the mRNA.

[0949] The reaction is cleaned up using Invitrogen's PureLink™ PCR Micro Kit (Carlsbad, CA) per manufacturer's instructions (up to 5 rag). Larger reactions will require a cleanup using a product with a larger capacity. Following the cleanup, the cDNA is quantified using the NanoDrop and analyzed by agarose gel electrophoresis to confirm the cDNA is the expected size. The cDNA is then submitted for sequencing analysis before proceeding to the in vitro transcription reaction.

### Example 3. In Vitro Transcription

[0950] The in vitro transcription reaction generates mRNA containing modified nucleotides or modified RNA. The input nucleotide triphosphate (NTP) mix is made in-house using natural and un-natural NTPs.

[0951] A typical in vitro transcription reaction includes the following:
[0952] 1. Template cDNA 1.0 μg
[0953] 2. 10× transcription buffer (400 mM Tris-HCl pH 8.0, 190 mM MgCl₂, 50 mM DTT, 10 mM Spermidine) 2.0 μl
[0954] 3. Custom NTPs (25 mM each) 7.2 μl
[0955] 4. RNase Inhibitor 20 U
[0956] 5. T7 RNA polymerase 3000 U
[0957] 6. dH₂O Up to 20.0 μl. and
[0958] 7. Incubation at 37° C. for 3 hr-5 hrs.

[0959] The crude IVT mix may be stored at 4° C. overnight for cleanup the next day. 1 U of RNase-free DNase is then used to digest the original template. After 15 minutes of incubation at 37° C., the mRNA is purified using Ambion's MEGAclear™ Kit (Austin, TX) following the manufacturer's instructions. This kit can purify up to 500 μg of RNA. Following the cleanup, the RNA is quantified using the NanoDrop and analyzed by agarose gel electrophoresis to confirm the RNA is the proper size and that no degradation of the RNA has occurred.

### Example 4. Enzymatic Capping of mRNA

[0960] Capping of the mRNA is performed as follows where the mixture includes: IVT RNA 60 μg-180 μg and dH₂O up to 72 μl. The mixture is incubated at 65° C. for 5 minutes to denature RNA, then transfer immediately to ice.

[0961] The protocol then involves the mixing of 10× Capping Buffer (0.5 M Tris-HCl (pH 8.0), 60 mM KCl, 12.5 mM MgCl2)(10.0 μl); 20 mM GTP (5.0 μl); 20 mM S-Adenosyl Methionine (2.5 μl); RNase Inhibitor (100 U); 2′-O-Methyltransferase (400 U); Vaccinia capping enzyme (Guanylyl transferase) (40 U); dH₂O (Up to 28 μl); and incubation at 37° C. for 30 minutes for 60 μg RNA or up to 2 hours for 180 μg of RNA.

[0962] The mRNA is then purified using Ambion's MEGAclear™ Kit (Austin, TX) following the manufacturer's instructions. Following the cleanup, the RNA is quantified using the NanoDrop (ThermoFisher, Waltham, MA) and analyzed by agarose gel electrophoresis to confirm the RNA is the proper size and that no degradation of the RNA has occurred. The RNA product may also be sequenced by running a reverse-transcription-PCR to generate the cDNA for sequencing.

### Example 5. PolyA Tailing Reaction

[0963] Without a poly-T in the cDNA, a poly-A tailing reaction must be performed before cleaning the final product. This is done by mixing Capped IVT RNA (100 μl); RNase Inhibitor (20 U); 10× Tailing Buffer (0.5 M Tris-HCl (pH 8.0), 2.5 M NaCl, 100 mM MgCl2)(12.0 μl); 20 mM ATP (6.0 μl); Poly-A Polymerase (20 U); dH₂O up to 123.5 μl and incubation at 37° C. for 30 min. If the poly-A tail is already in the transcript, then the tailing reaction may be skipped and proceed directly to cleanup with Ambion's MEGAclear™ kit (up to 500 μg). Poly-A Polymerase is preferably a recombinant enzyme expressed in yeast.

[0964] For studies performed and described herein, the poly-A tail is encoded in the IVT template to comprise 160 nucleotides in length. However, it should be understood that the processivity or integrity of the polyA tailing reaction may not always result in exactly 160 nucleotides. Hence polyA tails of approximately 160 nucleotides, e.g, about 150-165, 155, 156, 157, 158, 159, 160, 161, 162, 163, 164 or 165 are within the scope of the invention.

### Example 6. Natural 5′ Caps and 5′ Cap Analogues

[0965] 5′-capping of modified RNA may be completed concomitantly during the in vitro-transcription reaction using the following chemical RNA cap analogs to generate the 5′-guanosine cap structure according to manufacturer protocols: 3′-O-Me-m7G(5′)ppp(5′)G; G(5′)ppp(5′)A; G(5′)ppp(5′)G; m7G(5′)ppp(5′)A; m7G(5′)ppp(5′)G (New England BioLabs, Ipswich, MA). 5′-capping of modified RNA may be completed post-transcriptionally using a Vaccinia Virus Capping Enzyme to generate the “Cap 0” structure: m7G(5′)ppp(5′)G (New England BioLabs, Ipswich, MA). Cap 1 structure may be generated using both Vaccinia Virus Capping Enzyme and a 2′-O methyl-transferase to generate: m7G(5′)ppp(5′)G-2′-O-methyl. Cap 2 structure may be generated from the Cap 1 structure followed by the 2′-O-methylation of the 5′-antepenultimate nucleotide using a 2′-O methyl-transferase. Cap 3 structure may be generated from the Cap 2 structure followed by the 2′-O-methylation of the 5′-preantepenultimate nucleotide using a 2′-O methyl-transferase. Enzymes are preferably derived from a recombinant source.

[0966] When transfected into mammalian cells, the modified mRNAs may have a stability of between 12-18 hours or more than 18 hours, e.g., 24, 36, 48, 60, 72 or greater than 72 hours.

### Example 7. Chemical Cap vs. Enzymatically-Derived Cap Protein Expression Assay

[0967] Synthetic mRNAs encoding human G-CSF containing the ARCA cap analog or the Cap1 structure can be transfected into human primary keratinocytes at equal concentrations. 6, 12, 24 and 36 hours post-transfection the amount of G-CSF secreted into the culture medium can be assayed by ELISA. Synthetic mRNAs that secrete higher levels of G-CSF into the medium would correspond to a synthetic mRNA with a higher translationally-competent Cap structure.

### Example 8. Chemical Cap vs. Enzymatically-Derived Cap Purity Analysis

[0968] Synthetic mRNAs encoding human G-CSF containing the ARCA cap analog or the Cap1 structure crude synthesis products can be compared for purity using denaturing Agarose-Urea gel electrophoresis or HPLC analysis. Synthetic mRNAs with a single, consolidated band by electrophoresis correspond to the higher purity product compared to a synthetic mRNA with multiple bands or streaking bands. Synthetic mRNAs with a single HPLC peak would also correspond to a higher purity product. The capping reaction with a higher efficiency would provide a more pure mRNA population.

### Example 9. Chemical Cap vs. Enzymatically-Derived Cap Cytokine Analysis

[0969] Synthetic mRNAs encoding human G-CSF containing the ARCA cap analog or the Cap1 structure can be transfected into human primary keratinocytes at multiple concentrations. 6, 12, 24 and 36 hours post-transfection the amount of pro-inflammatory cytokines such as TNF-alpha and IFN-beta secreted into the culture medium can be assayed by ELISA. Synthetic mRNAs that secrete higher levels of pro-inflammatory cytokines into the medium would correspond to a synthetic mRNA containing an immune-activating cap structure.

### Example 10. Chemical Cap Vs. Enzymatically-Derived Cap Capping Reaction Efficiency

[0970] Synthetic mRNAs encoding human G-CSF containing the ARCA cap analog or the Cap1 structure can be analyzed for capping reaction efficiency by LC-MS after capped mRNA nuclease treatment. Nuclease treatment of capped mRNAs would yield a mixture of free nucleotides and the capped 5′-5-triphosphate cap structure detectable by LC-MS. The amount of capped product on the LC-MS spectra can be expressed as a percent of total mRNA from the reaction and would correspond to capping reaction efficiency. The Cap structure with a higher capping reaction efficiency would have a higher amount of capped product by LC-MS.

### Example 11. Agarose Gel Electrophoresis of Modified RNA or RT PCR Products

[0971] Individual modRNAs (200-400 ng in a 20 μl volume) or reverse transcribed PCR products (200-400 ng) are loaded into a well on a non-denaturing 1.2% Agarose E-Gel (Invitrogen, Carlsbad, CA) and run for 12-15 minutes according to the manufacturer protocol.

### Example 12. Nanodrop Modified RNA Quantification and UV Spectral Data

[0972] Modified RNAs in TE buffer (1 μl) are used for Nanodrop UV absorbance readings to quantitate the yield of each modified RNA from an in vitro transcription reaction.

### Example 13. In Vitro Transcription of Modified RNA Containing Varying Poly-A Tail Lengths

[0973] Modified mRNAs were made using standard laboratory methods and materials for in vitro transcription with the exception that the nucleotide mix contains modified nucleotides. Modified mRNAs of the present example included 5-methycytosine and pseudouridine. The open reading frame (ORF) of the gene of interest is flanked by a 5′ untranslated region (UTR) containing a strong Kozak translational initiation signal and an alpha-globin 3′ UTR terminating with an oligo(dT) sequence for templated addition of a polyA tail for modified RNAs not incorporating Adenosine analogs. Adenosine-containing modRNAs are synthesized without an oligo (dT) sequence to allow for post-transcription poly (A) polymerase poly-(A) tailing. Poly-a tail lengths of 0 nts, 80 nts, 120 nts, 160 nts were generated for human G-CSF. G-CSF sequences include the cDNA sequence (SEQ ID NO: 4257), the mRNA sequence (SEQ ID NO: 4258) and the protein sequence (SEQ ID NO: 4259). Detection of G-CSF may be performed by the primer probe sets for cDNA including the forward primer TTG GAC CCT CGT ACA GAA GCT AAT ACG (SEQ ID NO: 4260), a reverse primer for template Poly(A) tailing T(₁₂₀)CT TCC TAC TCA GGC TTT ATT CAA AGA CCA (SEQ ID NO: 4261) and a reverse primer for post-transcriptional Poly(A) polymerase tailing CTT CCT ACT CAG GCT TTA TTC AAA GAC CA (SED ID NO: 4262). Detection may also be performed by G-CSF modified nucleic acid molecule reverse-transcriptase polymerase chain reaction (RT-PCR) forward primer TGG CCG GTC CCG CGA CCC AA (SEQ ID NO: 4263) and reverse primer GCT TCA CGG CTG CGC AAG AT (SEQ ID NO: 4264).

[0974] Synthesized reverse primers were designed and ordered from IDT. The reverse primers incorporate a poly-T40, poly-T80, poly-T120, poly-T160 for a poly-A40, poly-A80, poly-A120, and poly-A160 respectively. The Human Embryonic Kidney (HEK) 293 were grown in Eagles' Minimal Essential Medium (EMEM) and 10% Fetal Bovine Serum (FBS) until they reached a confluence of 80-90%. Approximately 80,000 cells were transfected with 100 ng and 500 ng of modified RNA complexed with RNAiMax from Invitrogen (Carlsbad, CA) in a 24-well plate. The RNA:RNAiMax complex was formed by first incubating the RNAiMax with EMEM in a 5× volumetric dilution for 10 minutes at room temperature.

[0975] The RNA vial was then mixed with the RNAiMAX vial and incubated for 20-30 at room temperature before being added to the cells in a drop-wise fashion. Recombinant Human G-CSF was added at 2 ng/mL to the control cell culture wells. The concentration of secreted Human G-CSF was measured at 12 hours post-transfection. FIG. 4 shows the histogram for the Enzyme-linked immunosorbent assay (ELISA) for Human G-CSF from HEK293 cells transfected with human G-CSF modified RNA that had varying poly-A tail lengths: 0 nts, 80 nts, 120 nts, 160 nts. We observed increased protein expression with the 160 nts poly-A tail.

[0976] From the data it can be determined that longer poly-A tails produce more protein and that this activity is dose dependent.

### Example 14. Expression of Modified Nucleic Acid with microRNA Binding Site

[0977] Human embryonic kidney epithelial cells (HEK293A) and primary human hepatocytes (Hepatocytes) were seeded at a density of 200,000 per well in 500 ul cell culture medium (InVitro GRO medium from Celsis, Chicago, IL). G-CSF mRNA having an alpha-globin 3′UTR (G-CSF alpha) (cDNA sequence is shown in SEQ ID NO: 4265; mRNA sequence is shown in SEQ ID NO: 4266; polyA tail of approximately 160 nucleotides not shown in sequence; 5′Cap, Cap1; fully modified with 5-methylcytidine and pseudouridine) G-CSF mRNA having an alpha-globin 3′UTR and a miR-122 binding site (G-CSF miR-122) (cDNA sequence is shown in SEQ ID NO: 4267; mRNA sequence is shown in SEQ ID NO: 4268; polyA tail of approximately 160 nucleotides not shown in sequence; 5′Cap, Cap1; fully modified with 5-methylcytidine and pseudouridine) or G-CSF mRNA having an alpha-globin 3′UTR with four miR-122 binding sites with the seed deleted (G-CSF no seed) (cDNA sequence is shown in SEQ ID NO: 4269; mRNA sequence is shown in SEQ ID NO: 4270; polyA tail of approximately 160 nucleotides not shown in sequence; 5′Cap, Cap1; fully modified with 5-methylcytidine and pseudouridine) was tested at a concentration of 250 ng per well in 24 well plates. The expression of G-CSF was measured by ELISA and the results are shown in Table 17

TABLE 17
miR-122 Binding Sites

| | HEK293A | Hepatocytes |
|---|---|---|
| | Protein | Protein |
| | Expression | Expression |
| | (ng/mL) | (ng/mL) |
| G-CSF alpha | 99.85 | 8.18 |
| G-CSF miR-122 | 87.67 | 0 |
| G-CSF no seed | 200.2 | 8.05 |

[0978] Since HEK293 cells do not express miR-122 there was no down-regulation of G-CSF protein from the sequence containing miR-122. Whereas, the human hepatocytes express high levels of miR-122 and there was a drastic down-regulation of G-CSF protein observed when the G-CSF sequence contained the miR-122 target sequence. Consequently, the mRNA functioned as an auxotrophic mRNA.

### Example 15. Directed SAR of Pseudouridine and N1-Methyl PseudoUridine

[0979] With the recent focus on the pyrimidine nucleoside pseudouridine, a series of structure-activity studies were designed to investigate mRNA containing modifications to pseudouridine or N1-methyl-pseudourdine.

[0980] The study was designed to explore the effect of chain length, increased lipophilicity, presence of ring structures, and alteration of hydrophobic or hydrophilic interactions when modifications were made at the N1 position, C6 position, the 2-position, the 4-position and on the phosphate backbone. Stability is also investigated.

[0981] To this end, modifications involving alkylation, cycloalkylation, alkyl-cycloalkylation, arylation, alkyl-arylation, alkylation moieties with amino groups, alkylation moieties with carboxylic acid groups, and alkylation moieties containing amino acid charged moieties are investigated. The degree of alkylation is generally C₁-C₆. Examples of the chemistry modifications include those listed in Table 18 and 19.

TABLE 18
Pseudouridine and N1-methyl Pseudo Uridine SAR

| | Compound | Naturally |
|---|---|---|
| Chemistry Modification | # | occuring |
| N1-Modifications | | |
| N1-Ethyl-pseudo-UTP | 1 | N |
| N1-Propyl-pseudo-UTP | 2 | N |
| N1-iso-propyl-pseudo-UTP | 3 | N |
| N1-(2,2,2-Trifluoroethyl)-pseudo-UTP | 4 | N |
| N1-Cyclopropyl-pseudo-UTP | 5 | N |
| N1-Cyclopropylmethyl-pseudo-UTP | 6 | N |
| N1-Phenyl-pseudo-UTP | 7 | N |
| N1-Benzyl-pseudo-UTP | 8 | N |
| N1-Aminomethyl-pseudo-UTP | 9 | N |
| Pseudo-UTP-N1-2-ethanoic acid | 10 | N |
| N1-(3-Amino-3-carboxypropyl)pseudo-UTP | 11 | N |
| N1-Methyl-3-(3-amino-3-carboxypropyl) | 12 | Y |
| pseudo-UTP | | |
| C-6 Modifications | | |
| 6-Methyl-pseudo-UTP | 13 | N |
| 6-Trifluoromethyl-pseudo-UTP | 14 | N |
| 6-Methoxy-pseudo-UTP | 15 | N |
| 6-Phenyl-pseudo-UTP | 16 | N |
| 6-Iodo-pseudo-UTP | 17 | N |
| 6-Bromo-pseudo-UTP | 18 | N |
| 6-Chloro-pseudo-UTP | 19 | N |
| 6-Fluoro-pseudo-UTP | 20 | N |
| 2- or 4-position Modifications | | |
| 4-Thio-pseudo-UTP | 21 | N |
| 2-Thio-pseudo-UTP | 22 | N |
| Phosphate backbone Modifications | | |
| Alpha-thio-pseudo-UTP | 23 | N |
| N1-Me-alpha-thio-pseudo-UTP | 24 | N |

TABLE 19
Pseudouridine and N1-methyl Pseudo Uridine SAR

| | Compound | Naturally |
|---|---|---|
| Chemistry Modification | # | occuring |
| N1-Methyl-pseudo-UTP | 1 | Y |
| N1-Butyl-pseudo-UTP | 2 | N |
| N1-tert-Butyl-pseudo-UTP | 3 | N |
| N1-Pentyl-pseudo-UTP | 4 | N |
| N1-Hexyl-pseudo-UTP | 5 | N |
| N1-Trifluoromethyl-pseudo-UTP | 6 | Y |
| N1-Cyclobutyl-pseudo-UTP | 7 | N |
| N1-Cyclopentyl-pseudo-UTP | 8 | N |
| N1-Cyclohexyl-pseudo-UTP | 9 | N |
| N1-Cycloheptyl-pseudo-UTP | 10 | N |
| Nl-Cyclooctyl-pseudo-UTP | 11 | N |
| N1-Cyclobutylmethyl-pseudo-UTP | 12 | N |
| N1-Cyclopentylmethyl-pseudo-UTP | 13 | N |
| N1-Cyclohexylmethyl-pseudo-UTP | 14 | N |
| N1-Cycloheptylmethyl-pseudo-UTP | 15 | N |
| N1-Cyclooctylmethyl-pseudo-UTP | 16 | N |
| N1-p-tolyl-pseudo-UTP | 17 | N |
| N1-(2,4,6-Trimethyl-phenyl)pseudo-UTP | 18 | N |
| N1-(4-Methoxy-phenyl)pseudo-UTP | 19 | N |
| N1-(4-Amino-phenyl)pseudo-UTP | 20 | N |
| N1(4-Nitro-phenyl)pseudo-UTP | 21 | N |
| Pseudo-UTP-N1-p-benzoic acid | 22 | N |
| N1-(4-Methyl-benzyl)pseudo-UTP | 24 | N |
| N1-(2,4,6-Trimethyl-benzyl)pseudo-UTP | 23 | N |
| N1-(4-Methoxy-benzyl)pseudo-UTP | 25 | N |
| N1-(4-Amino-benzyl)pseudo-UTP | 26 | N |
| N1-(4-Nitro-benzyl)pseudo-UTP | 27 | N |
| Pseudo-UTP-N1-methyl-p-benzoic acid | 28 | N |
| N1-(2-Amino-ethyl)pseudo-UTP | 29 | N |
| N1-(3-Amino-propyl)pseudo-UTP | 30 | N |
| N1-(4-Amino-butyl)pseudo-UTP | 31 | N |
| N1-(5-Amino-pentyl)pseudo-UTP | 32 | N |
| N1-(6-Amino-hexyl)pseudo-UTP | 33 | N |
| Pseudo-UTP-N1-3-propionic acid | 34 | N |
| Pseudo-UTP-N1-4-butanoic acid | 35 | N |
| Pseudo-UTP-N1-5-pentanoic acid | 36 | N |
| Pseudo-UTP-N1-6-hexanoic acid | 37 | N |
| Pseudo-UTP-N1-7-heptanoic acid | 38 | N |
| N1-(2-Amino-2-carboxyethyl)pseudo-UTP | 39 | N |
| N1-(4-Amino-4-carboxybutyl)pseudo-UTP | 40 | N |
| N3-Alkyl-pseudo-UTP | 41 | N |
| 6-Ethyl-pseudo-UTP | 42 | N |
| 6-Propyl-pseudo-UTP | 43 | N |
| 6-iso-Propyl-pseudo-UTP | 44 | N |
| 6-Butyl-pseudo-UTP | 45 | N |
| 6-tert-Butyl-pseudo-UTP | 46 | N |
| 6-(2,2,2-Trifluoroethyl)-pseudo-UTP | 47 | N |
| 6-Ethoxy-pseudo-UTP | 48 | N |
| 6-Trifluoromethoxy-pseudo-UTP | 49 | N |
| 6-Phenyl-pseudo-UTP | 50 | N |
| 6-(Substituted-Phenyl)-pseudo-UTP | 51 | N |
| 6-Cyano-pseudo-UTP | 52 | N |
| 6-Azido-pseudo-UTP | 53 | N |
| 6-Amino-pseudo-UTP | 54 | N |
| 6-Ethylcarboxylate-pseudo-UTP | 54b | N |
| 6-Hydroxy-pseudo-UTP | 55 | N |
| 6-Methylamino-pseudo-UTP | 55b | N |
| 6-Dimethylamino-pseudo-UTP | 57 | N |
| 6-Hydroxyamino-pseudo-UTP | 59 | N |
| 6-Formyl-pseudo-UTP | 60 | N |
| 6-(4-Morpholino)-pseudo-UTP | 61 | N |
| 6-(4-Thiomorpholino)-pseudo-UTP | 62 | N |
| N1-Me-4-thio-pseudo-UTP | 63 | N |
| N1-Me-2-thio-pseudo-UTP | 64 | N |
| 1,6-Dimethyl-pseudo-UTP | 65 | N |
| 1-Methyl-6-trifluoromethyl-pseudo-UTP | 66 | N |
| 1-Methyl-6-ethyl-pseudo-UTP | 67 | N |
| 1-Methyl-6-propyl-pseudo-UTP | 68 | N |
| 1-Methyl-6-iso-propyl-pseudo-UTP | 69 | N |
| 1-Methyl-6-butyl-pseudo-UTP | 70 | N |
| 1-Methyl-6-tert-butyl-pseudo-UTP | 71 | N |
| 1-Methyl-6-(2,2,2-Trifluoroethyl)pseudo-UTP | 72 | N |
| 1-Methyl-6-iodo-pseudo-UTP | 73 | N |
| 1-Methyl-6-bromo-pseudo-UTP | 74 | N |
| 1-Methyl-6-chloro-pseudo-UTP | 75 | N |
| 1-Methyl-6-fluoro-pseudo-UTP | 76 | N |
| 1-Methyl-6-methoxy-pseudo-UTP | 77 | N |
| 1-Methyl-6-ethoxy-pseudo-UTP | 78 | N |
| 1-Methyl-6-trifluoromethoxy-pseudo-UTP | 79 | N |
| 1-Methyl-6-phenyl-pseudo-UTP | 80 | N |
| 1-Methyl-6-(substituted phenyl)pseudo-UTP | 81 | N |
| 1-Methyl-6-cyano-pseudo-UTP | 82 | N |
| 1-Methyl-6-azido-pseudo-UTP | 83 | N |
| 1-Methyl-6-amino-pseudo-UTP | 84 | N |
| 1-Methyl-6-ethylcarboxylate-pseudo-UTP | 85 | N |
| 1-Methyl-6-hydroxy-pseudo-UTP | 86 | N |
| 1-Methyl-6-methylamino-pseudo-UTP | 87 | N |
| 1-Methyl-6-dimethylamino-pseudo-UTP | 88 | N |
| 1-Methyl-6-hydroxyamino-pseudo-UTP | 89 | N |
| 1-Methyl-6-formyl-pseudo-UTP | 90 | N |
| 1-Methyl-6-(4-morpholino)-pseudo-UTP | 91 | N |
| 1-Methyl-6-(4-thiomorpholino)-pseudo-UTP | 92 | N |
| 1-Alkyl-6-vinyl-pseudo-UTP | 93 | N |
| 1-Alkyl-6-allyl-pseudo-UTP | 94 | N |
| 1-Alkyl-6-homoallyl-pseudo-UTP | 95 | N |
| 1-Alkyl-6-ethynyl-pseudo-UTP | 96 | N |
| 1-Alkyl-6-(2-propynyl)-pseudo-UTP | 97 | N |
| 1-Alky1-6-(1-propynyl)-pseudo-UTP | 98 | N |

### Example 16. Incorporation of Naturally and Non-Naturally Occurring Nucleosides

[0982] Naturally and non-naturally occurring nucleosides are incorporated into mRNA encoding a polypeptide of interest. Examples of these are given in Tables 20 and 21. Certain commercially available nucleoside triphosphates (NTPs) are investigated in the polynucleotides of the invention. A selection of these are given in Table 20. The resultant mRNA are then examined for their ability to produce protein, induce cytokines, and/or produce a therapeutic outcome.

TABLE 20
Naturally and non-naturally occurring nucleosides

| | Compound | Naturally |
|---|---|---|
| Chemistry Modification | # | occuring |
| N4-Methyl-Cytosine | 1 | Y |
| N4,N4-Dimethyl-2′-OMe-Cytosine | 2 | Y |
| 5-Oxyacetic acid-methyl ester-Uridine | 3 | Y |
| N3-Methyl-pseudo-Uridine | 4 | Y |
| 5-Hydroxymethyl-Cytosine | 5 | Y |
| 5-Trifluoromethyl-Cytosine | 6 | N |
| 5-Trifluoromethyl-Uridine | 7 | N |
| 5-Methyl-amino-methyl-Uridine | 8 | Y |
| 5-Carboxy-methyl-amino-methyl-Uridine | 9 | Y |
| 5-Carboxymethylaminomethyl-2′-OMe-Uridine | 10 | Y |
| 5-Carboxymethylaminomethyl-2-thio-Uridine | 11 | Y |
| 5-Methylaminomethyl-2-thio-Uridine | 12 | Y |
| 5-Methoxy-carbonyl-methyl-Uridine | 13 | Y |
| 5-Methoxy-carbonyl-methyl-2′-OMe-Uridine | 14 | Y |
| 5-Oxyacetic acid-Uridine | 15 | Y |
| 3-(3-Amino-3-carboxypropyl)-Uridine | 16 | Y |
| 5-(carboxyhydroxymethyl)uridine methyl ester | 17 | Y |
| 5-(carboxyhydroxymethyl)uridine | 18 | Y |

TABLE 21
Non-naturally occurring nucleoside triphosphates

| | Compound | Naturally |
|---|---|---|
| Chemistry Modification | # | occuring |
| N1-Me-GTP | 1 | N |
| 2′-OMe-2-Amino-ATP | 2 | N |
| 2′-OMe-pseudo-UTP | 3 | Y |
| 2′-OMe-6-Me-UTP | 4 | N |
| 2′-Azido-2′-deoxy-ATP | 5 | N |
| 2′-Azido-2′-deoxy-GTP | 6 | N |
| 2′-Azido-2′-deoxy-UTP | 7 | N |
| 2′-Azido-2′-deoxy-CTP | 8 | N |
| 2′-Amino-2′-deoxy-ATP | 9 | N |
| 2′-Amino-2′-deoxy-GTP | 10 | N |
| 2′-Amino-2′-deoxy-UTP | 11 | N |
| 2′-Amino-2′-deoxy-CTP | 12 | N |
| 2-Amino-ATP | 13 | N |
| 8-Aza-ATP | 14 | N |
| Xanthosine-5′-TP | 15 | N |
| 5-Bromo-CTP | 16 | N |
| 2′-F-5-Methyl-2′-deoxy-UTP | 17 | N |
| 5-Aminoallyl-CTP | 18 | N |
| 2-Amino-riboside-TP | 19 | N |

### Example 17. Incorporation of Modifications to the Nucleobase and Carbohydrate (Sugar)

[0983] Naturally and non-naturally occurring nucleosides are incorporated into mRNA encoding a polypeptide of interest. Commercially available nucleosides and NTPs having modifications to both the nucleobase and carbohydrate (sugar) are examined for their ability to be incorporated into mRNA and to produce protein, induce cytokines, and/or produce a therapeutic outcome. Examples of these nucleosides are given in Tables 22 and 23.

TABLE 22
Combination modifications

| | Compound |
|---|---|
| Chemistry Modification | # |
| 5-iodo-2′-fluoro-deoxyuridine | 1 |
| 5-iodo-cytidine | 6 |
| 2′-bromo-deoxyuridine | 7 |
| 8-bromo-adenosine | 8 |
| 8-bromo-guanosine | 9 |
| 2,2′-anhydro-cytidine hydrochloride | 10 |
| 2,2′-anhydro-uridine | 11 |
| 2′-Azido-deoxyuridine | 12 |
| 2-amino-adenosine | 13 |
| N4-Benzoyl-cytidine | 14 |
| N4-Amino-cytidine | 15 |
| 2′-O-Methyl-N4-Acetyl-cytidine | 16 |
| 2′Fluoro-N4-Acetyl-cytidine | 17 |
| 2′Fluor-N4-Bz-cytidine | 18 |
| 2′O-methyl-N4-Bz-cytidine | 19 |
| 2′O-methyl-N6-Bz-deoxyadenosine | 20 |
| 2′Fluoro-N6-Bz-deoxyadenosine | 21 |
| N2-isobutyl-guanosine | 22 |
| 2′Fluro-N2-isobutyl-guanosine | 23 |
| 2′O-methyl-N2-isobutyl-guanosine | 24 |

TABLE 23
Naturally occuring combinations

| | Compound | Naturally |
|---|---|---|
| Name | # | occurring |
| 5-Methoxycarbonylmethyl-2-thiouridine TP | 1 | Y |
| 5-Methylaminomethyl-2-thiouridine TP | 2 | Y |
| 5-Crbamoylmethyluridine TP | 3 | Y |
| 5-Carbamoylmethyl-2′-O-methyluridine TP | 4 | Y |
| 1-Methyl-3-(3-amino-3-carboxypropyl) | 5 | Y |
| pseudouridine TP | | |
| 5-Methylaminomethyl-2-selenouridine TP | 6 | Y |
| 5-Carboxymethyluridine TP | 7 | Y |
| 5-Methyldihydrouridine TP | 8 | Y |
| lysidine TP | 9 | Y |
| 5-Taurinomethyluridine TP | 10 | Y |
| 5-Taurinomethyl-2-thiouridine TP | 11 | Y |
| 5-(iso-Pentenylaminomethyl)uridine TP | 12 | Y |
| 5-(iso-Pentenylaminomethyl)-2-thiouridine TP | 13 | Y |
| 5-(iso-Pentenylaminomethyl)-2′-O- | 14 | Y |
| methyluridine TP | | |
| N4-Acetyl-2′-O-methylcytidine TP | 15 | Y |
| N4,2′-O-Dimethylcytidine TP | 16 | Y |
| 5-Formyl-2′-O-methylcytidine TP | 17 | Y |
| 2'-O-Methylpseudouridine TP | 18 | Y |
| 2-Thio-2′-O-methyluridine TP | 19 | Y |
| 3,2′-O-Dimethyluridine TP | 20 | Y |

[0984] In the tables “UTP” stands for uridine triphosphate, “GTP” stands for guanosine triphosphate, “ATP” stands for adenosine triphosphate, “CTP” stands for cytosine triphosphate, “TP” stands for triphosphate and “Bz” stands for benzyl.

### Example 18. Signal Sequence Exchange Study

[0985] Several variants of mmRNAs encoding human Granulocyte colony stimulating factor (G-CSF) (mRNA sequence shown in SEQ ID NO: 4258; polyA tail of approximately 160 nucleotides not shown in sequence; 5′cap, Cap1) were synthesized using modified nucleotides pseudouridine and 5-methylcytidine (pseudo-U/5 mC). These variants included the G-CSF constructs encoding either the wild-type N terminal secretory signal peptide sequence (MAGPATQSPMKLMALQLLLWHSALWTVQEA; SEQ ID NO: 4271), no secretory signal peptide sequence, or secretory signal peptide sequences taken from other mRNAs. These included sequences where the wild type GCSF signal peptide sequence was replaced with the signal peptide sequence of either: human a-1-anti trypsin (AAT) (MMPSSVSWGILLLAGLCCLVPVSLA; SEQ ID NO: 4272), human Factor IX (FIX) (MQRVNMIMAESPSLITICLLGYLLSAECTVFLDHENANKILNRPKR; SEQ ID NO: 4273), human Prolactin (Prolac) (MKGSLLLLLVSNLLLCQSVAP; SEQ ID NO: 4274), or human Albumin (Alb) (MKWVTFISLLFLFSSAYSRGVFRR; SEQ ID NO: 4275).

[0986] 250 ng of modified mRNA encoding each G-CSF variant was transfected into HEK293A (293A in the table), mouse myoblast (MM in the table) (C2C12, CRL-1772, ATCC) and rat myoblast (RM in the table) (L6 line, CRL-1458, ATCC) cell lines in a 24 well plate using 1 ul of Lipofectamine 2000 (Life Technologies), each well containing 300,000 cells. The supernatants were harvested after 24 hrs and the secreted G-CSF protein was analyzed by ELISA using the Human G-CSF ELISA kit (Life Technologies). The data shown in Table 24 reveal that cells transfected with G-CSF mmRNA encoding the Albumin signal peptide secrete at least 12 fold more G-CSF protein than its wild type counterpart.

TABLE 24
Signal Peptide Exchange

| | 293A | MM | RM |
|---|---|---|---|
| Signal peptides | (pg/ml) | (pg/ml) | (pg/ml) |
| G-CSF Natural | 9650 | 3450 | 6050 |
| α-1-anti trypsin | 9950 | 5000 | 8475 |
| Factor IX | 11675 | 6175 | 11675 |
| Prolactin | 7875 | 1525 | 9800 |
| Albumin | 122050 | 81050 | 173300 |
| No Signal peptide | 0 | 0 | 0 |

### Example 19. 3′ Untranslated Regions

[0987] A 3′ UTR may be provided a flanking region. Multiple 3′ UTRs may be included in the flanking region and may be the same or of different sequences. Any portion of the flanking regions, including none, may be codon optimized and any may independently contain one or more different structural or chemical modifications, before and/or after codon optimization.

[0988] Shown in Table 7 is a listing of 3′-untranslated regions of the invention. Variants of 3′ UTRs may be utilized wherein one or more nucleotides are added or removed to the termini, including A, T, C or G.

### Example 20. Alteration of Polynucleotide Trafficking: NLS and NES

[0989] Two nuclear export signals (NES) which may be incorporated into the polynucleotides of the present invention includes those reported by Muller, et a1 (Traffic, 2009, 10: 514-527) and are associated with signaling via the gene COMMD1. These are NES1, PVAIIELEL (SEQ ID NO 4276) and NES2, VNQILKTLSE (SEQ ID NO 4277).

[0990] Nuclear localization signals may also be used. One such sequence is PKKKRKV (SEQ ID NO: 4278).

[0991] Cell lines or mice are administered one or more polynucleotides having a NLS or NES encoded therein. Upon administration the polynucleotide is trafficked to an alternate location, e.g., into the nucleus using the NLS. The polypeptide having the NLS would be trafficked to the nucleus where it would deliver either a survival or death signal to the nuclear microenvironment. Polypeptides which may be localized to the nucleus include those with altered binding properties for DNA which will function to alter the expression profile of the cell in a therapeutically beneficial manner for the cell, tissue or organism.

[0992] In one experiment, the polynucleotide encodes a COMMD1 mut1/mut 2+NLS (e.g., both NES signals disrupted plus a NLS added) following the methods of Muller et al, (Traffic 2009; 10: 514-527) and van de Sluis et al, (J Clin Invest. 2010; 120 (6):2119-2130). The signal sequence may encode a polypeptide or a scrambled sequence which is not translatable. The signal sequence encoded would interact with HIF1-alpha to alter the transcritome of the cancer cells.

[0993] The experiment is repeated under normal and hypoxic conditions.

[0994] Once identified the HIF1-alpha dependent polynucleotide is tested in cancer cell lines clonal survival or a marker of apoptosis is measured and compared to control or mock treated cells.

### Example 21. miRNA Binding Sites (BS) Useful as Sensor Sequences in Polynucleotides

[0995] miRNA-binding sites are used in the 3′UTR of mRNA therapeutics to direct cytotoxic or cytoprotective mRNA therapeutics to specific cells (normal and/or cancerous).

[0996] A strong apoptotic signal (i.e., AIFsh—Apoptosis Inducing Factor short isoform) is encoded as the polypeptide or “signal” and is encoded along with a series of 3′UTR miR binding sites, such as that for mir-122a, that would make the polynucleotide relatively much more stable in cancerous cells than in normal cells.

[0997] Experiments comparing cancer vs. normal heaptic cell lines where the cancer cell lines have a specific miR signature are performed in vitro. SNU449 or HEP3B (human derived HCC cell lines) are used because both have been shown to have “undetectable miR-122a”, whereas normal hepatocytes should have very high miR-122a levels. First a cancer cell is selected which is sensitive to AIFsh polynucleotide (i.e., it results in apoptosis).

[0998] Three miR-122a binding sites are encoded into the 3′UTR of an mRNA sequence for AIFsh and the study arms include 2 cell lines (normal hepatocyte, SNU449 or HEP3B)×5 treatments (vehicle alone, polynucleotide untranslatabe, polynucleotide AIFsh (no miR BS in 3′UTR), 3′UTR[miR122a BS×3]-polynucleotide untranslatable, 3′UTR[miR122a BS×3]-polynucleotide AIFsh).

[0999] The expected result would be significant apoptosis in the face of polynucleotide AIFsh in both normal and cancer (HEP3B or SNU449) cell lines in the absence of any 3′UTR-miR122a BS. However, a significant difference in the relative apoptosis of normal vs. cancer cell lines in the face of 3′UTR [miR122a BS×3]-polynucleotide AIFsh.

[1000] Reversibility of the effect is shown with the co-administration of miR122a to the cancer cell line (e.g., through some transduction of the miR122a activity back into the cancer cell line).

[1001] In vivo animal studies are then performed using any of the models disclosed herein or a commercially available orthotopic HCC model.

### Example 22. Cell Lines for the Study of Polynucleotides

[1002] Polynucleotides of the present invention and formulations comprising the polynucleotides of the present invention or described in International application No PCT/US2012/69610, herein incorporated by reference in its entirety, may be investigated in any number of cancer or normal cell lines. Cell lines useful in the present invention include those from ATCC (Manassas, VA) and are listed in Table 25.

TABLE 25
Cell lines

| ATCC | | |
|---|---|---|
| Number | Hybridoma or Cell line Description | Name |
| CCL-171 | Homo sapiens (human) Source: Organ: lung | MRC-5 |
| | Disease: normal | |
| | Cell Type: fibroblast | |
| CCL-185 | Homo sapiens (human) Source: Organ: lung | A549 |
| | Disease: carcinoma | |
| CCL-248 | Homo sapiens (human) Source: Organ: colon | T84 |
| | Disease: colorectal carcinoma | |
| | Derived from metastatic site: lung | |
| CCL-256 | Homo sapiens (human) Source: Organ: lung | NCI-H2126 |
| | Disease: adenocarcinoma; non-small cell lung | [H2126] |
| | cancer | |
| | Derived from metastatic site: pleural effusion | |
| CCL-257 | Homo sapiens (human) Source: Organ: lung | NCI-H1688 |
| | Disease: carcinoma; classic small cell lung | |
| | cancer | |
| CCL-75 | Homo sapiens (human) Source: Organ: lung | WI-38 |
| | Disease: normal | |
| | Cell Type: fibroblast | |
| CCL-75.1 | Homo sapiens (human) Source: Organ: lung | WI-38 VA-13 |
| | Cell Type: fibroblastSV40 transformed | subline 2RA |
| CCL-95.1 | Homo sapiens (human) Source: Organ: lung | WI-26 VA4 |
| | Cell Type: SV40 transformed | |
| CRL-10741 | Homo sapiens (human) Source: Organ: liver | C3A |
| | Disease: hepatocellular carcinoma | [HepG2/C3A, |
| | | derivative of Hep |
| | | G2 (ATCC HB- |
| | | 8065)] |
| CRL-11233 | Homo sapiens (human) Source: Organ: liver | THLE-3 |
| | Tissue: left lobe | |
| | Cell Type: epithelialimmortalized with SV40 | |
| | large T antigen | |
| CRL-11351 | Homo sapiens (human) Source: Organ: lung | H69AR |
| | Disease: carcinoma; small cell lung cancer; | |
| | multidrug resistant | |
| | Cell Type: epithelial | |
| CRL-1848 | Homo sapiens (human) Source: Organ: lung | NCI-H292 [H292] |
| | Disease: mucoepidermoid pulmonary carcinoma | |
| CRL-1918 | Homo sapiens (human) Source: Organ: pancreas | CFPAC-1 |
| | Disease: ductal adenocarcinoma; cystic fibrosis | |
| | Derived from metastatic site: liver metastasis | |
| CRL-1973 | Homo sapiens (human) Source: Organ: testis | NTERA-2 cl.D1 |
| | Disease: malignant pluripotent embryonal | [NT2/D1] |
| | carcinoma | |
| | Derived from metastatic site: lung | |
| CRL-2049 | Homo sapiens (human) Source: Organ: lung | DMS 79 |
| | Disease: carcinoma; small cell lung cancer | |
| CRL-2062 | Homo sapiens (human) Source: Organ: lung | DMS 53 |
| | Disease: carcinoma; small cell lung cancer | |
| CRL-2064 | Homo sapiens (human) Source: Organ: lung | DMS 153 |
| | Disease: carcinoma; small cell lung cancer | |
| | Derived from metastatic site: liver | |
| CRL-2066 | Homo sapiens (human) Source: Organ: lung | DMS 114 |
| | Disease: carcinoma; small cell lung cancer | |
| CRL-2081 | Homo sapiens (human) Source: Disease: biphasic | MSTO-211H |
| | mesothelioma | |
| | Derived from metastatic site: lung | |
| CRL-2170 | Homo sapiens (human) Source: Organ: lung | SW 1573 [SW- |
| | Disease: alveolar cell carcinoma | 1573, SW1573] |
| CRL-2177 | Homo sapiens (human) Source: Organ: lung | SW 1271 [SW- |
| | Disease: carcinoma; small cell lung cancer | 1271, SW1271] |
| CRL-2195 | Homo sapiens (human) Source: Organ: lung | SHP-77 |
| | Disease: carcinoma; small cell lung cancer | |
| | Cell Type: large cell, variant; | |
| CRL-2233 | Homo sapiens (human) Source: Organ: liver | SNU-398 |
| | Disease: hepatocellular carcinoma | |
| CRL-2234 | Homo sapiens (human) Source: Organ: liver | SNU-449 |
| | Tumor Stage: grade II-III/IV | |
| | Disease: hepatocellular carcinoma | |
| CRL-2235 | Homo sapiens (human) Source: Organ: liver | SNU-182 |
| | Tumor Stage: grade III/IV | |
| | Disease: hepatocellular carcinoma | |
| CRL-2236 | Homo sapiens (human) Source: Organ: liver | SNU-475 |
| | Tumor Stage: grade II-IV/V | |
| | Disease: hepatocellular carcinoma | |
| CRL-2237 | Homo sapiens (human) Source: Organ: liver | SNU-387 |
| | Tumor Stage: grade IV/V | |
| | Disease: pleomorphic hepatocellular carcinoma | |
| CRL-2238 | Homo sapiens (human) Source: Organ: liver | SNU-423 |
| | Tumor Stage: grade III/IV | |
| | Disease: pleomorphic hepatocellular carcinoma | |
| CRL-2503 | Homo sapiens (human) Source: Organ: lung | NL20 |
| | Tissue: bronchus | |
| | Disease: normal | |
| CRL-2504 | Homo sapiens (human) Source: Organ: lung | NL20-TA |
| | Tissue: bronchus | [NL20T-A] |
| | Disease: normal | |
| CRL-2706 | Homo sapiens (human) Source: Organ: liver | THLE-2 |
| | Tissue: left lobe | |
| | Cell Type: epithelialSV40 transformed | |
| CRL-2741 | Homo sapiens (human) Source: Organ: lung | HBE135-E6E7 |
| | Tissue: bronchus | |
| | Cell Type: epithelialHPV-16 E6/E7 transformed | |
| CRL-2868 | Homo sapiens (human) Source: Organ: lung | HCC827 |
| | Disease: adenocarcinoma | |
| | Cell Type: epithelial | |
| CRL-2871 | Homo sapiens (human) Source: Organ: lung | HCC4006 |
| | Disease: adenocarcinoma | |
| | Derived from metastatic site: pleural effusion | |
| | Cell Type: epithelial | |
| CRL-5800 | Homo sapiens (human) Source: Organ: lung | NCI-H23 [H23] |
| | Disease: adenocarcinoma; non-small cell lung | |
| | cancer | |
| CRL-5803 | Homo sapiens (human) Source: Organ: lung | NCI-H1299 |
| | Disease: carcinoma; non-small cell lung cancer | |
| | Derived from metastatic site: lymph node | |
| CRL-5804 | Homo sapiens (human) Source: Organ: lung | NCI-H187 [H187] |
| | Disease: carcinoma; classic small cell lung | |
| | cancer | |
| | Derived from metastatic site: pleural effusion | |
| CRL-5807 | Homo sapiens (human) Source: Organ: lung | NCI-H358 [H- |
| | Tissue: bronchiole; alveolus | 358, H358] |
| | Disease: bronchioalveolar carcinoma; non-small | |
| | cell lung cancer | |
| CRL-5808 | Homo sapiens (human) Source: Organ: lung | NCI-H378 [H378] |
| | Tumor Stage: stage E | |
| | Disease: carcinoma; classic small cell lung | |
| | cancer | |
| | Derived from metastatic site: pleural effusion | |
| CRL-5810 | Homo sapiens (human) Source: Organ: lung | NCI-H522 [H522] |
| | Tumor Stage: stage 2 | |
| | Disease: adenocarcinoma; non-small cell lung | |
| | cancer | |
| CRL-5811 | Homo sapiens (human) Source: Organ: lung | NCI-H526 [H526] |
| | Tumor Stage: stage E | |
| | Disease: carcinoma; variant small cell lung | |
| | cancer | |
| | Derived from metastatic site: bone marrow | |
| CRL-5815 | Homo sapiens (human) Source: Organ: lung | NCI-H727 [H727] |
| | Tissue: bronchus | |
| | Disease: carcinoid | |
| CRL-5816 | Homo sapiens (human) Source: Organ: lung | NCI-H810 [H810] |
| | Tumor Stage: stage 2 | |
| | Disease: carcinoma; non-small cell lung cancer | |
| CRL-5817 | Homo sapiens (human) Source: Organ: lung | NCI-H889 [H889] |
| | Tumor Stage: stage E | |
| | Disease: carcinoma; classic small cell lung | |
| | cancer | |
| | Derived from metastatic site: lymph node | |
| CRL-5818 | Homo sapiens (human) Source: Organ: lung | NCI-H1155 |
| | Disease: carcinoma; non-small cell lung cancer | [H1155] |
| | Derived from metastatic site: lymph node | |
| CRL-5819 | Homo sapiens (human) Source: Organ: lung | NCI-H1404 |
| | Disease: papillary adenocarcinoma | [H1404] |
| | Derived from metastatic site: lymph node | |
| CRL-5822 | Homo sapiens (human) Source: Organ: stomach | NCI-N87 [N87] |
| | Disease: gastric carcinoma | |
| | Derived from metastatic site: liver | |
| CRL-5823 | Homo sapiens (human) Source: Organ: lung | NCI-H196 [H196] |
| | Tumor Stage: stage E | |
| | Disease: carcinoma; variant small cell lung | |
| | cancer | |
| | Derived from metastatic site: pleural effusion | |
| CRL-5824 | Homo sapiens (human) Source: Organ: lung | NCI-H211 [H211] |
| | Tumor Stage: stage E | |
| | Disease: carcinoma; small cell lung cancer | |
| | Derived from metastatic site: bone marrow | |
| CRL-5825 | Homo sapiens (human) Source: Organ: lung | NCI-H220 [H220] |
| | Tumor Stage: stage E | |
| | Disease: carcinoma; classic small cell lung | |
| | cancer | |
| | Derived from metastatic site: pleural effusion | |
| CRL-5828 | Homo sapiens (human) Source: Organ: lung | NCI-H250 [H250] |
| | Tumor Stage: stage E | |
| | Disease: carcinoma; classic small cell lung | |
| | cancer | |
| | Derived from metastatic site: brain | |
| CRL-5831 | Homo sapiens (human) Source: Organ: lung | NCI-H524 [H524] |
| | Tumor Stage: stage L | |
| | Disease: carcinoma; variant small cell lung | |
| | cancer | |
| | Derived from metastatic site: lymph node | |
| CRL-5834 | Homo sapiens (human) Source: Organ: lung | NCI-H647 [H647] |
| | Tumor Stage: stage 3A | |
| | Disease: adenosquamous carcinoma; non-small | |
| | cell lung cancer | |
| | Derived from metastatic site: pleural effusion | |
| CRL-5835 | Homo sapiens (human) Source: Organ: lung | NCI-H650 [H650] |
| | Disease: bronchioalveolar carcinoma; non-small | |
| | cell lung cancer | |
| | Derived from metastatic site: lymph node | |
| CRL-5836 | Homo sapiens (human) Source: Organ: lung | NCI-H711 [H711] |
| | Tumor Stage: stage E | |
| | Disease: carcinoma; classic small cell lung | |
| | cancer | |
| | Derived from metastatic site: bone marrow | |
| CRL-5837 | Homo sapiens (human) Source: Organ: lung | NCI-H719 [H719] |
| | Tumor Stage: stage E | |
| | Disease: carcinoma; classic small cell lung | |
| | cancer | |
| | Derived from metastatic site: bone marrow | |
| CRL-5840 | Homo sapiens (human) Source: Organ: lung | NCI-H740 [H740] |
| | Tumor Stage: stage E | |
| | Disease: carcinoma; classic small cell lung | |
| | cancer | |
| | Derived from metastatic site: lymph node | |
| CRL-5841 | Homo sapiens (human) Source: Organ: lung | NCI-H748 [H748] |
| | Tumor Stage: stage E | |
| | Disease: carcinoma; classic small cell lung | |
| | cancer | |
| | Derived from metastatic site: lymph node | |
| CRL-5842 | Homo sapiens (human) Source: Organ: lung | NCI-H774 [H774] |
| | Tumor Stage: stage E | |
| | Disease: carcinoma; classic small cell lung | |
| | cancer | |
| | Derived from metastatic site: soft tissue | |
| CRL-5844 | Homo sapiens (human) Source: Organ: lung | NCI-H838 [H838] |
| | Tumor stage: 3B | |
| | Disease: adenocarcinoma; non-small cell lung | |
| | cancer | |
| | Derived from metastatic site: lymph node | |
| CRL-5845 | Homo sapiens (human) Source: Organ: lung | NCI-H841 [H841] |
| | Tumor Stage: stage L | |
| | Disease: carcinoma; variant small cell lung | |
| | cancer | |
| | Derived from metastatic site: lymph node | |
| CRL-5846 | Homo sapiens (human) Source: Organ: lung | NCI-H847 [H847] |
| | Tumor Stage: stage L | |
| | Disease: carcinoma; classic small cell lung | |
| | cancer | |
| | Derived from metastatic site: pleural effusion | |
| CRL-5849 | Homo sapiens (human) Source: Organ: lung | NCI-H865 [H865] |
| | Tumor Stage: stage L | |
| | Disease: carcinoma; classic small cell lung | |
| | cancer | |
| | Derived from metastatic site: pleural effusion | |
| CRL-5850 | Homo sapiens (human) Source: Organ: lung | NCI-H920 [H920] |
| | Tumor Stage: stage 4 | |
| | Disease: adenocarcinoma; non-small cell lung | |
| | cancer | |
| | Derived from metastatic site: lymph node | |
| CRL-5853 | Homo sapiens (human) Source: Organ: lung | NCI-H1048 |
| | Disease: carcinoma; small cell lung cancer | [H1048] |
| | Derived from metastatic site: pleural effusion | |
| CRL-5855 | Homo sapiens (human) Source: Organ: lung | NCI-H1092 |
| | Tumor Stage: stage E | [H1092] |
| | Disease: carcinoma; classic small cell lung | |
| | cancer | |
| | Derived from metastatic site: bone marrow | |
| CRL-5856 | Homo sapiens (human) Source: Organ: lung | NCI-H1105 |
| | Tumor Stage: stage E | [H1105] |
| | Disease: carcinoma; classic small cell lung | |
| | cancer | |
| | Derived from metastatic site: lymph node | |
| CRL-5858 | Homo sapiens (human) Source: Organ: lung | NCI-H1184 |
| | Tumor Stage: stage L | [H1184] |
| | Disease: carcinoma; small cell lung cancer | |
| | Derived from metastatic site: lymph node | |
| CRL-5859 | Homo sapiens (human) Source: Organ: lung | NCI-H1238 |
| | TumorStage: stage E | [H1238] |
| | Disease: carcinoma; small cell lung cancer | |
| | Derived from metastatic site: bone marrow | |
| CRL-5864 | Homo sapiens (human) Source: Organ: lung | NCI-H1341 |
| | Disease: carcinoma; small cell lung cancer | [H1341] |
| | Derived from metastatic site: cervix | |
| CRL-5867 | Homo sapiens (human) Source: Organ: lung | NCI-H1385 |
| | Tumor Stage: stage 3A | [H1385] |
| | Disease: carcinoma; non-small cell lung cancer | |
| | Derived from metastatic site: lymph node | |
| CRL-5869 | Homo sapiens (human) Source: Organ: lung | NCI-H1417 |
| | Tumor Stage: stage E | [H1417] |
| | Disease: carcinoma; classic small cell lung | |
| | cancer | |
| CRL-5870 | Homo sapiens (human) Source: Organ: lung | NCI-H1435 |
| | Disease: adenocarcinoma; non-small cell lung | [H1435] |
| | cancer | |
| CRL-5871 | Homo sapiens (human) Source: Organ: lung | NCI-H1436 |
| | Tumor Stage: stage E | [H1436] |
| | Disease: carcinoma; classic small cell lung | |
| | cancer | |
| | Derived from metastatic site: lymph node | |
| CRL-5872 | Homo sapiens (human) Source: Organ: lung | NCI-H1437 |
| | Tumor Stage: stage 1 | [H1437] |
| | Disease: adenocarcinoma; non-small cell lung | |
| | cancer | |
| | Derived from metastatic site: pleural effusion | |
| CRL-5874 | Homo sapiens (human) Source: Organ: lung | NCI-H1522 |
| | Tumor Stage: stage E | [H1522] |
| | Disease: carcinoma; small cell lung cancer | |
| | Derived from metastatic site: pleural effusion | |
| CRL-5875 | Homo sapiens (human) Source: Organ: lung | NCI-H1563 |
| | Disease: adenocarcinoma; non-small cell lung | [H1563] |
| | cancer | |
| CRL-5876 | Homo sapiens (human) Source: Organ: lung | NCI-H1568 |
| | Disease: adenocarcinoma; non-small cell lung | [H1568] |
| | cancer | |
| | Derived from metastatic site: lymph node | |
| CRL-5877 | Homo sapiens (human) Source: Organ: lung | NCI-H1573 |
| | Tumor Stage: stage 4 | [H1573] |
| | Disease: adenocarcinoma | |
| | Derived from metastatic site: soft tissue | |
| CRL-5878 | Homo sapiens (human) Source: Organ: lung | NCI-H1581 |
| | Tumor Stage: stage 4 | [H1581] |
| | Disease: non-small cell lung cancer | |
| | Cell Type: large cell; | |
| CRL-5879 | Homo sapiens (human) Source: Tumor Stage: | NCI-H1618 |
| | stage E | [H1618] |
| | Disease: carcinoma; small cell lung cancer | |
| | Derived from metastatic site: bone marrow | |
| CRL-5881 | Homo sapiens (human) Source: Organ: lung | NCI-H1623 |
| | Tumor Stage: stage 3B | [H1623] |
| | Disease: adenocarcinoma; non-small cell lung | |
| | cancer | |
| | Derived from metastatic site: lymph node | |
| CRL-5883 | Homo sapiens (human) Source: Organ: lung | NCI-H1650 [H- |
| | Tumor Stage: stage 3B | 1650, H1650] |
| | Disease: adenocarcinoma; bronchoalveolar | |
| | carcinoma | |
| | Derived from metastatic site: pleural effusion | |
| CRL-5884 | Homo sapiens (human) Source: Organ: lung | NCI-H1651 |
| | Disease: adenocarcinoma; non-small cell lung | [H1651] |
| | cancer | |
| CRL-5885 | Homo sapiens (human) Source: Organ: lung | NCI-H1666 [H- |
| | Disease: adenocarcinoma; bronchoalveolar | 1666, H1666] |
| | carcinoma | |
| | Derived from metastatic site: pleural effusion | |
| CRL-5886 | Homo sapiens (human) Source: Organ: lung | NCI-H1672 |
| | Tumor Stage: stage L | [H1672] |
| | Disease: carcinoma; classic small cell lung | |
| | cancer | |
| CRL-5887 | Homo sapiens (human) Source: Organ: lung | NCI-H1693 |
| | Tumor Stage: stage 3B | [H1693] |
| | Disease: adenocarcinoma; non-small cell lung | |
| | cancer | |
| | Derived from metastatic site: lymph node | |
| CRL-5888 | Homo sapiens (human) Source: Organ: lung | NCI-H1694 |
| | Tumor Stage: stage E | [H1694] |
| | Disease: carcinoma; classic small cell lung | |
| | cancer | |
| | Derived from metastatic site: ascites | |
| CRL-5889 | Homo sapiens (human) Source: Organ: lung | NCI-H1703 |
| | Tumor Stage: stage 1 | [H1703] |
| | Disease: non-small cell lung cancer | |
| | Cell Type: squamous cell; | |
| CRL-5891 | Homo sapiens (human) Source: Organ: lung | NCI-H1734 [H- |
| | Disease: adenocarcinoma; non-small cell lung | 1734, H1734] |
| | cancer | |
| CRL-5892 | Homo sapiens (human) Source: Organ: lung | NCI-H1755 |
| | Tumor Stage: stage 4 | [H1755] |
| | Disease: adenocarcinoma; non-small cell lung | |
| | cancer | |
| | Derived from metastatic site: liver | |
| CRL-5892 | Homo sapiens (human) Source: Organ: lung | NCI-H1755 |
| | Tumo Stage: stage 4 | [H1755] |
| | Disease: adenocarcinoma; non-small cell lung | |
| | cancer | |
| | Derived from metastatic site: liver | |
| CRL-5893 | Homo sapiens (human) Source: Organ: lung | NCI-H1770 |
| | Tumor Stage: stage 4 | [H1770] |
| | Disease: carcinoma; non-small cell lung cancer | |
| | Derived from metastatic site: lymph node | |
| | Cell Type: neuroendocrine; | |
| CRL-5896 | Homo sapiens (human) Source: Organ: lung | NCI-H1793 |
| | Disease: adenocarcinoma; non-small cell lung | [H1793] |
| | cancer | |
| CRL-5898 | Homo sapiens (human) Source: Organ: lung | NCI-H1836 |
| | Tumor Stage: stage L | [H1836] |
| | Disease: carcinoma; classic small cell lung | |
| | cancer | |
| CRL-5899 | Homo sapiens (human) Source: Organ: lung | NCI-H1838 |
| | Disease: adenocarcinoma; non-small cell lung | [H1838] |
| | cancer | |
| CRL-5900 | Homo sapiens (human) Source: Organ: lung | NCI-H1869 |
| | Tumor Stage: stage 4 | [H1869] |
| | Disease: non-small cell lung cancer | |
| | Derived from metastatic site: pleural effusion | |
| | Cell Type: squamous cell; | |
| CRL-5902 | Homo sapiens (human) Source: Organ: lung | NCI-H1876 |
| | Tumor Stage: stage E | [H1876] |
| | Disease: carcinoma; classic small cell lung | |
| | cancer | |
| | Derived from metastatic site: lymph node | |
| CRL-5903 | Homo sapiens (human) Source: Organ: lung | NCI-H1882 |
| | Tumor Stage: stage E | [H1882] |
| | Disease: carcinoma; small cell lung cancer | |
| | Derived from metastatic site: bone marrow | |
| CRL-5904 | Homo sapiens (human) Source: Organ: lung | NCI-H1915 |
| | Tumor Stage: stage 4 | [H1915] |
| | Disease: poorly differentiated carcinoma; non- | |
| | small cell lung cancer | |
| | Derived from metastatic site: brain | |
| | Cell Type: large cell; | |
| CRL-5906 | Homo sapiens (human) Source: Organ: lung | NCI-H1930 |
| | Tumor Stage: stage L | [H1930] |
| | Disease: carcinoma; classic small cell lung | |
| | cancer | |
| | Derived from metastatic site: lymph node | |
| CRL-5907 | Homo sapiens (human) Source: Organ: lung | NCI-H1944 |
| | Tumor Stage: stage 3B | [H1944] |
| | Disease: adenocarcinoma; non-small cell lung | |
| | cancer | |
| | Derived from metastatic site: soft tissue | |
| CRL-5908 | Homo sapiens (human) Source: Organ: lung | NCI-H1975 [H- |
| | Disease: adenocarcinoma; non-small cell lung | 1975, H1975] |
| | cancer | |
| CRL-5909 | Homo sapiens (human) Source: Organ: lung | NCI-H1993 |
| | Tumor Stage: stage 3A | [H1993] |
| | Disease: adenocarcinoma; non-small cell lung | |
| | cancer | |
| | Derived from metastatic site: lymph node | |
| CRL-5912 | Homo sapiens (human) Source: Organ: lung | NCI-H2023 |
| | Tumor Stage: stage 3A | [H2023] |
| | Disease: adenocarcinoma; non-small cell lung | |
| | cancer | |
| | Derived from metastatic site: lymph node | |
| CRL-5913 | Homo sapiens (human) Source: Organ: lung | NCI-H2029 |
| | Tumor Stage: stage E | [H2029] |
| | Disease: carcinoma; small cell lung cancer | |
| | Derived from metastatic site: lymph node | |
| CRL-5914 | Homo sapiens (human) Source: Organ: lung | NCI-H2030 |
| | Disease: adenocarcinoma; non-small cell lung | [H2030] |
| | cancer | |
| | Derived from metastatic site: lymph node | |
| CRL-5917 | Homo sapiens (human) Source: Organ: lung | NCI-H2066 |
| | Tumor Stage: stage 1 | [H2066] |
| | Disease: mixed; small cell lung cancer; | |
| | adenocarcinoma; squamous cell carcinoma | |
| CRL-5918 | Homo sapiens (human) Source: Organ: lung | NCI-H2073 |
| | Tumor Stage: stage 3A | [H2073] |
| | Disease: adenocarcinoma; non-small cell lung | |
| | cancer | |
| CRL-5920 | Homo sapiens (human) Source: Organ: lung | NCI-H2081 |
| | Tumor Stage: stage E | [H2081] |
| | Disease: carcinoma; classic small cell lung | |
| | cancer | |
| | Derived from metastatic site: pleural effusion | |
| CRL-5921 | Homo sapiens (human) Source: Organ: lung | NCI-H2085 |
| | Disease: adenocarcinoma; non-small cell lung | [H2085] |
| | cancer | |
| CRL-5922 | Homo sapiens (human) Source: Organ: lung | NCI-H2087 |
| | Tumor Stage: stage 1 | [H2087] |
| | Disease: adenocarcinoma; non-small cell lung | |
| | cancer | |
| | Derived from metastatic site: lymph node | |
| CRL-5923 | Homo sapiens (human) Source: Organ: lung | NCI-H2106 |
| | Tissue: neuroendocrine | [H2106] |
| | Tumor Stage: stage 4 | |
| | Disease: non-small cell lung cancer | |
| | Derived from metastatic site: lymph node | |
| CRL-5924 | Homo sapiens (human) Source: Organ: lung | NCI-H2110 |
| | Disease: non-small cell lung cancer | [H2110] |
| | Derived from metastatic site: pleural effusion | |
| CRL-5926 | Homo sapiens (human) Source: Organ: lung | NCI-H2135 |
| | Disease: non-small cell lung cancer | [H2135] |
| CRL-5927 | Homo sapiens (human) Source: Organ: lung | NCI-H2141 |
| | Tumor Stage: stage E | [H2141] |
| | Disease: carcinoma; small cell lung cancer | |
| | Derived from metastatic site: lymph node | |
| CRL-5929 | Homo sapiens (human) Source: Organ: lung | NCI-H2171 |
| | Tumor Stage: stage E | [H2171] |
| | Disease: carcinoma; small cell lung cancer | |
| | Derived from metastatic site: pleural effusion | |
| CRL-5930 | Homo sapiens (human) Source: Organ: lung | NCI-H2172 |
| | Disease: non-small cell lung cancer | [H2172] |
| CRL-5931 | Homo sapiens (human) Source: Organ: lung | NCI-H2195 |
| | Tumor Stage: stage E | [H2195] |
| | Disease: carcinoma; small cell lung cancer | |
| | Derived from metastatic site: bone marrow | |
| CRL-5932 | Homo sapiens (human) Source: Organ: lung | NCI-H2196 |
| | Tumor Stage: stage E | [H2196] |
| | Disease: carcinoma; small cell lung cancer | |
| | Derived from metastatic site: bone marrow | |
| CRL-5933 | Homo sapiens (human) Source: Organ: lung | NCI-H2198 |
| | Tumor Stage: stage E | [H2198] |
| | Disease: carcinoma; small cell lung cancer | |
| | Derived from metastatic site: lymph node | |
| CRL-5934 | Homo sapiens (human) Source: Organ: lung | NCI-H2227 |
| | Tumor Stage: stage E | [H2227] |
| | Disease: carcinoma; small cell lung cancer | |
| CRL-5935 | Homo sapiens (human) Source: Organ: lung | NCI-H2228 |
| | Disease: adenocarcinoma; non-small cell lung | [H2228] |
| | cancer | |
| CRL-5938 | Homo sapiens (human) Source: Organ: lung | NCI-H2286 |
| | Tumor Stage: stage 1 | [H2286] |
| | Disease: mixed; small cell lung cancer; | |
| | adenocarcinoma; squamous cell carcinoma | |
| CRL-5939 | Homo sapiens (human) Source: Organ: lung | NCI-H2291 |
| | Disease: adenocarcinoma; non-small cell lung | [H2291] |
| | cancer | |
| | Derived from metastatic site: lymph node | |
| CRL-5940 | Homo sapiens (human) Source: Organ: lung | NCI-H2330 |
| | Tumor Stage: stage L | [H2330] |
| | Disease: carcinoma; small cell lung cancer | |
| | Derived from metastatic site: lymph node | |
| CRL-5941 | Homo sapiens (human) Source: Organ: lung | NCI-H2342 |
| | Tumor Stage: stage 3A | [H2342] |
| | Disease: adenocarcinoma; non-small cell lung | |
| | cancer | |
| CRL-5942 | Homo sapiens (human) Source: Organ: lung | NCI-H2347 |
| | Tumor Stage: stage 1 | [H2347] |
| | Disease: adenocarcinoma; non-small cell lung | |
| | cancer | |
| CRL-5944 | Homo sapiens (human) Source: Organ: lung | NCI-H2405 |
| | Tumor Stage: stage 4 | [H2405] |
| | Disease: adenocarcinoma; non-small cell lung | |
| | cancer | |
| | Derived from metastatic site: ascites | |
| CRL-5945 | Homo sapiens (human) Source: Organ: lung | NCI-H2444 |
| | Disease: non-small cell lung cancer | [H2444] |
| CRL-5975 | Homo sapiens (human) Source: Organ: lung | UMC-11 |
| | Disease: carcinoid | |
| CRL-5976 | Homo sapiens (human) Source: Organ: lung | NCI-H64 [H64] |
| | Tumor Stage: stage E | |
| | Disease: carcinoma; small cell lung cancer | |
| | Derived from metastatic site: lymph node | |
| CRL-5978 | Homo sapiens (human) Source: Organ: lung | NCI-H735 [H735] |
| | Tumor Stage: stage E | |
| | Disease: carcinoma; small cell lung cancer | |
| | Derived from metastatic site: liver | |
| CRL-5978 | Homo sapiens (human) Source: Organ: lung | NCI-H735 [H735] |
| | Tumor Stage: stage E | |
| | Disease: carcinoma; small cell lung cancer | |
| | Derived from metastatic site: liver | |
| CRL-5982 | Homo sapiens (human) Source: Organ: lung | NCI-H1963 |
| | Tumor Stage: stage L | [H1963] |
| | Disease: carcinoma; small cell lung cancer | |
| CRL-5983 | Homo sapiens (human) Source: Organ: lung | NCI-H2107 |
| | Tumor Stage: stage E | [H2107] |
| | Disease: carcinoma; small cell lung cancer | |
| | Derived from metastatic site: bone marrow | |
| CRL-5984 | Homo sapiens (human) Source: Organ: lung | NCI-H2108 |
| | Tumor Stage: stage E | [H2108] |
| | Disease: carcinoma; small cell lung cancer | |
| | Derived from metastatic site: bone marrow | |
| CRL-5985 | Homo sapiens (human) Source: Organ: lung | NCI-H2122 |
| | Tumor Stage: stage 4 | [H2122] |
| | Disease: adenocarcinoma; non-small cell lung | |
| | cancer | |
| | Derived from metastatic site: pleural effusion | |
| CRL-7343 | Homo sapiens (human) Source: Organ: lung | Hs 573.T |
| | Disease: cancer | |
| CRL-7344 | Homo sapiens (human) Source: Organ: lung | Hs 573.Lu |
| CRL-8024 | Homo sapiens (human) Source: Organ: liver | PLC/PRF/5 |
| | Disease: hepatoma | |
| | Cell Type: Alexander cells; | |
| CRL-9609 | Homo sapiens (human) Source: Organ: lung | BEAS-2B |
| | Tissue: bronchus | |
| | Disease: normal | |
| | Cell Type: epithelialvirus transformed | |
| HB-8065 | Homo sapiens (human) Source: Organ: liver | Hep G2 |
| | Disease: hepatocellular carcinoma | |
| HTB-105 | Homo sapiens (human) Source: Organ: testes | Tera-1 |
| | Disease: embryonal carcinoma, malignant | |
| | Derived from metastatic site: lung | |
| HTB-106 | Homo sapiens (human) Source: Disease: | Tera-2 |
| | malignant embryonal carcinoma | |
| | Derived from metastatic site: lung | |
| HTB-119 | Homo sapiens (human) Source: Organ: lung | NCI-H69 [H69] |
| | Disease: carcinoma; small cell lung cancer | |
| HTB-120 | Homo sapiens (human) Source: Organ: lung | NCI-H128 [H128] |
| | Disease: carcinoma; small cell lung cancer | |
| | Derived from metastatic site: pleural effusion | |
| HTB-168 | Homo sapiens (human) Source: Organ: lung | ChaGo-K-1 |
| | Tissue: bronchus | |
| | Disease: bronchogenic carcinoma | |
| HTB-171 | Homo sapiens (human) Source: Organ: lung | NCI-H446 [H446] |
| | Disease: carcinoma; small cell lung cancer | |
| | Derived from metastatic site: pleural effusion | |
| HTB-172 | Homo sapiens (human) Source: Organ: lung | NCI-H209 [H209] |
| | Disease: carcinoma; small cell lung cancer | |
| | Derived from metastatic site: bone marrow | |
| HTB-173 | Homo sapiens (human) Source: Organ: lung | NCI-H146 [H146] |
| | Disease: carcinoma; small cell lung cancer | |
| | Derived from metastatic site: bone marrow | |
| HTB-174 | Homo sapiens (human) Source: Organ: lung | NCI-H441 [H441] |
| | Disease: papillary adenocarcinoma | |
| HTB-175 | Homo sapiens (human) Source: Organ: lung | NCI-H82 [H82] |
| | Disease: carcinoma; small cell lung cancer | |
| | Derived from metastatic site: pleural effusion | |
| HTB-177 | Homo sapiens (human) Source: Organ: lung | NCI-H460 [H460] |
| | Disease: carcinoma; large cell lung cancer | |
| | Derived from metastatic site: pleural effusion | |
| HTB-178 | Homo sapiens (human) Source: Organ: lung | NCI-H596 [H596] |
| | Disease: adenosquamous carcinoma | |
| HTB-179 | Homo sapiens (human) Source: Organ: lung | NCI-H676B |
| | Disease: adenocarcinoma | [H676B] |
| | Derived from metastatic site: pleural effusion | |
| HTB-180 | Homo sapiens (human) Source: Organ: lung | NCI-H345 [H345] |
| | Disease: carcinoma; small cell lung cancer | |
| | Derived from metastatic site: bone marrow | |
| HTB-181 | Homo sapiens (human) Source: Organ: lung | NCI-H820 [H820] |
| | Disease: papillary adenocarcinoma | |
| | Derived from metastatic site: lymph node | |
| HTB-182 | Homo sapiens (human) Source: Organ: lung | NCI-H520 [H520] |
| | Disease: squamous cell carcinoma | |
| HTB-183 | Homo sapiens (human) Source: Organ: lung | NCI-H661 [H661] |
| | Disease: carcinoma; large cell lung cancer | |
| | Derived from metastatic site: lymph node | |
| HTB-184 | Homo sapiens (human) Source: Organ: lung | NCI-H510A |
| | Disease: carcinoma; small cell lung cancer; | [H510A, NCI- |
| | extrapulmonary origin | H510] |
| | Derived from metastatic site: adrenal gland | |
| HTB-52 | Homo sapiens (human) Source: Organ: liver | SK-HEP-1 |
| | Tissue: ascites | |
| | Disease: adenocarcinoma | |
| HTB-53 | Homo sapiens (human) Source: Organ: lung | A-427 |
| | Disease: carcinoma | |
| HTB-54 | Homo sapiens (human) Source: Organ: lung | Calu-1 |
| | Tumor Stage: grade III | |
| | Disease: epidermoid carcinoma | |
| | Derived from metastatic site: pleura | |
| HTB-55 | Homo sapiens (human) Source: Organ: lung | Calu-3 |
| | Disease: adenocarcinoma | |
| | Derived from metastatic site: pleural effusion | |
| HTB-56 | Homo sapiens (human) Source: Organ: unknown, | Calu-6 |
| | probably lung | |
| | Disease: anaplastic carcinoma | |
| HTB-57 | Homo sapiens (human) Source: Organ: lung | SK-LU-1 |
| | Disease: adenocarcinoma | |
| HTB-58 | Homo sapiens (human) Source: Organ: lung | SK-MES-1 |
| | Disease: squamous cell carcinoma | |
| | Derived from metastatic site: pleural effusion | |
| HTB-59 | Homo sapiens (human) Source: Organ: lung | SW 900 [SW-900, |
| | Tumor Stage: grade IV | SW900] |
| | Disease: squamous cell carcinoma | |
| HTB-64 | Homo sapiens (human) Source: Disease: | Malme-3M |
| | malignant melanoma | |
| | Derived from metastatic site: lung | |
| HTB-79 | Homo sapiens (human) Source: Organ: pancreas | Capan-1 |
| | Disease: adenocarcinoma | |
| | Derived from metastatic site: liver | |

### Example 23. RNA Binding Proteins

[1003] RNA binding proteins may be provided as proteins and/or as nucleic acids encoding such proteins. RNA binding proteins play a multitude of roles in regulating RNA stability and protein translation. In some embodiments, RNA binding proteins are provided in protein and/or nucleic acid form with elements of the present invention. Such RNA binding proteins include, but are not limited to those listed (along with the ENSG number, identifying the corresponding gene as well as one or more ENST number, identifying transcriptional variants of each) in Table 26.

TABLE 26
RNA binding proteins

| | | | | ENST | | ENSP |
|---|---|---|---|---|---|---|
| | | | | SEQ | | SEQ |
| Protein | | | | ID | | ID |
| No. | RNA binding protein | ENSG | ENST | NO | ENSP | NO |
| 1 | AU RNA binding protein/enoyl- | 148090 | 422391 | 4279 | 402026 | 4632 |
| | CoA hydratase | | | | | |
| 2 | AU RNA binding protein/enoyl- | 148090 | 303617 | 4280 | 307334 | 4633 |
| | CoA hydratase | | | | | |
| 3 | AU RNA binding protein/enoyl- | 148090 | 375731 | 4281 | 364883 | 4634 |
| | CoA hydratase | | | | | |
| 4 | cold inducible RNA binding | 99622 | 320936 | 4282 | 322887 | 4635 |
| | protein | | | | | |
| 5 | cold inducible RNA binding | 99622 | 444172 | 4283 | 407512 | 4636 |
| | protein | | | | | |
| 6 | cold inducible RNA binding | 99622 | 413636 | 4284 | 412831 | 4637 |
| | protein | | | | | |
| 7 | cold shock domain containing | 172346 | 306149 | 4285 | 302485 | 4638 |
| | C2, RNA binding | | | | | |
| 8 | heterogeneous nuclear | 138668 | 543098 | 4286 | 439380 | 4639 |
| | ribonucleoprotein D (AU-rich | | | | | |
| | element RNA binding protein 1, | | | | | |
| | 37 kDa) | | | | | |
| 9 | heterogeneous nuclear | 138668 | 313899 | 4287 | 313199 | 4640 |
| | ribonucleoprotein D (AU-rich | | | | | |
| | element RNA binding protein 1, | | | | | |
| | 37 kDa) | | | | | |
| 10 | heterogeneous nuclear | 138668 | 541060 | 4288 | 437416 | 4641 |
| | ribonucleoprotein D (AU-rich | | | | | |
| | element RNA binding protein 1, | | | | | |
| | 37 kDa) | | | | | |
| 11 | heterogeneous nuclear | 138668 | 503822 | 4289 | 422615 | 4642 |
| | ribonucleoprotein D (AU-rich | | | | | |
| | element RNA binding protein 1, | | | | | |
| | 37 kDa) | | | | | |
| 12 | heterogeneous nuclear | 138668 | 507010 | 4290 | 421952 | 4643 |
| | ribonucleoprotein D (AU-rich | | | | | |
| | element RNA binding protein 1, | | | | | |
| | 37 kDa) | | | | | |
| 13 | heterogeneous nuclear | 138668 | 353341 | 4291 | 313327 | 4644 |
| | ribonucleoprotein D (AU-rich | | | | | |
| | element RNA binding protein 1, | | | | | |
| | 37 kDa) | | | | | |
| 14 | heterogeneous nuclear | 138668 | 514671 | 4292 | 426446 | 4645 |
| | ribonucleoprotein D (AU-rich | | | | | |
| | element RNA binding protein 1, | | | | | |
| | 37 kDa) | | | | | |
| | heterogeneous nuclear | 138668 | 352301 | 4293 | 305860 | 4646 |
| 15 | ribonucleoprotein D (AU-rich | | | | | |
| | element RNA binding protein 1, | | | | | |
| | 37 kDa) | | | | | |
| 16 | heterogeneous nuclear | 138668 | 307213 | 4294 | 307544 | 4647 |
| | ribonucleoprotein D (AU-rich | | | | | |
| | element RNA binding protein 1, | | | | | |
| | 37 kDa) | | | | | |
| 17 | insulin-like growth factor 2 | 159217 | 290341 | 4295 | 290341 | 4648 |
| | mRNA binding protein 1 | | | | | |
| 18 | insulin-like growth factor 2 | 73792 | 382199 | 4296 | 371634 | 4649 |
| | mRNA binding protein 2 | | | | | |
| 19 | insulin-like growth factor 2 | 73792 | 421047 | 4297 | 413787 | 4650 |
| | mRNA binding protein 2 | | | | | |
| 20 | insulin-like growth factor 2 | 73792 | 346192 | 4298 | 320204 | 4651 |
| | mRNA binding protein 2 | | | | | |
| 21 | insulin-like growth factor 2 | 136231 | 258729 | 4299 | 258729 | 4652 |
| | mRNA binding protein 3 | | | | | |
| 22 | KH domain containing, RNA | 121774 | 327300 | 4300 | 313829 | 4653 |
| | binding, signal transduction | | | | | |
| | associated 1 | | | | | |
| 23 | KH domain containing, RNA | 121774 | 492989 | 4301 | 417731 | 4654 |
| | binding, signal transduction | | | | | |
| | associated 1 | | | | | |
| 24 | KH domain containing, RNA | 121774 | 355201 | 4302 | 347336 | 4655 |
| | binding, signal transduction | | | | | |
| | associated 1 | | | | | |
| 25 | KH domain containing, RNA | 112232 | 281156 | 4303 | 281156 | 4656 |
| | binding, signal transduction | | | | | |
| | associated 2 | | | | | |
| 26 | KH domain containing, RNA | 112232 | 539571 | 4304 | 443437 | 4657 |
| | binding, signal transduction | | | | | |
| | associated 2 | | | | | |
| 27 | KH domain containing, RNA | 131773 | 355849 | 4305 | 348108 | 4658 |
| | binding, signal transduction | | | | | |
| | associated 3 | | | | | |
| 28 | QKI, KH domain containing, | 112531 | 361752 | 4306 | 355094 | 4659 |
| | RNA binding | | | | | |
| 29 | QKI, KH domain containing, | 112531 | 275262 | 4307 | 275262 | 4660 |
| | RNA binding | | | | | |
| 30 | QKI, KH domain containing, | 112531 | 392127 | 4308 | 375973 | 4661 |
| | RNA binding | | | | | |
| 31 | QKI, KH domain containing, | 112531 | 361195 | 4309 | 354867 | 4662 |
| | RNA binding | | | | | |
| 32 | QKI, KH domain containing, | 112531 | 453779 | 4310 | 408775 | 4663 |
| | RNA binding | | | | | |
| 33 | RALY RNA binding protein-like | 184672 | 522613 | 4311 | 427787 | 4664 |
| 34 | RALY RNA binding protein-like | 184672 | 523850 | 4312 | 428807 | 4665 |
| 35 | RALY RNA binding protein-like | 184672 | 521695 | 4313 | 428667 | 4666 |
| 36 | RALY RNA binding protein-like | 184672 | 521268 | 4314 | 430367 | 4667 |
| 37 | RALY RNA binding protein-like | 184672 | 517988 | 4315 | 428711 | 4668 |
| 38 | RALY RNA binding protein-like | 184672 | 522455 | 4316 | 430394 | 4669 |
| 39 | RD RNA binding protein | 204356 | 375425 | 4317 | 364574 | 4670 |
| 40 | RD RNA binding protein | 204356 | 444811 | 4318 | 388400 | 4671 |
| 41 | RD RNA binding protein | 204356 | 441998 | 4319 | 397914 | 4672 |
| 42 | RD RNA binding protein | 204356 | 375429 | 4320 | 364578 | 4673 |
| 43 | RD RNA binding protein | 204356 | 426722 | 4321 | 394340 | 4674 |
| 44 | RD RNA binding protein | 204356 | 454913 | 4322 | 409389 | 4675 |
| 45 | RD RNA binding protein | 206268 | 411745 | 4323 | 410872 | 4676 |
| 46 | RD RNA binding protein | 206268 | 456281 | 4324 | 396971 | 4677 |
| 47 | RD RNA binding protein | 206268 | 440478 | 4325 | 407528 | 4678 |
| 48 | RD RNA binding protein | 206268 | 383174 | 4326 | 372660 | 4679 |
| 49 | RD RNA binding protein | 206268 | 551833 | 4327 | 447903 | 4680 |
| 50 | RD RNA binding protein | 206268 | 458622 | 4328 | 409139 | 4681 |
| 51 | RD RNA binding protein | 206357 | 548056 | 4329 | 449897 | 4682 |
| 52 | RD RNA binding protein | 206357 | 434518 | 4330 | 409269 | 4683 |
| 53 | RD RNA binding protein | 206357 | 449057 | 4331 | 393793 | 4684 |
| 54 | RD RNA binding protein | 206357 | 383343 | 4332 | 372834 | 4685 |
| 55 | RD RNA binding protein | 206357 | 420039 | 4333 | 411487 | 4686 |
| 56 | RD RNA binding protein | 206357 | 425810 | 4334 | 403630 | 4687 |
| 57 | RD RNA binding protein | 229363 | 549252 | 4335 | 450250 | 4688 |
| 58 | RD RNA binding protein | 229363 | 448628 | 4336 | 394879 | 4689 |
| 59 | RD RNA binding protein | 229363 | 424762 | 4337 | 415567 | 4690 |
| 60 | RD RNA binding protein | 229363 | 418423 | 4338 | 395175 | 4691 |
| 61 | RD RNA binding protein | 229363 | 418059 | 4339 | 401342 | 4692 |
| 62 | RD RNA binding protein | 229363 | 453084 | 4340 | 393794 | 4693 |
| 63 | RD RNA binding protein | 231044 | 443464 | 4341 | 393103 | 4694 |
| 64 | RD RNA binding protein | 231044 | 548988 | 4342 | 449910 | 4695 |
| 65 | RD RNA binding protein | 231044 | 429857 | 4343 | 403623 | 4696 |
| 66 | RD RNA binding protein | 231044 | 437732 | 4344 | 397565 | 4697 |
| 67 | RD RNA binding protein | 231044 | 424967 | 4345 | 411724 | 4698 |
| 68 | RD RNA binding protein | 231044 | 420837 | 4346 | 414014 | 4699 |
| 69 | RD RNA binding protein | 233801 | 456263 | 4347 | 407630 | 4700 |
| 70 | RD RNA binding protein | 233801 | 452147 | 4348 | 401745 | 4701 |
| 71 | RD RNA binding protein | 233801 | 457397 | 4349 | 393005 | 4702 |
| 72 | RD RNA binding protein | 233801 | 552869 | 4350 | 447844 | 4703 |
| 73 | RD RNA binding protein | 233801 | 425721 | 4351 | 390689 | 4704 |
| 74 | RD RNA binding protein | 233801 | 435435 | 4352 | 396604 | 4705 |
| 75 | RNA binding motif (RNP1, | 102317 | 430348 | 4353 | 412764 | 4706 |
| | RRM) protein 3 | | | | | |
| 76 | RNA binding motif (RNP1, | 102317 | 376759 | 4354 | 365950 | 4707 |
| | RRM) protein 3 | | | | | |
| 77 | RNA binding motif (RNP1, | 102317 | 376755 | 4355 | 365946 | 4708 |
| | RRM) protein 3 | | | | | |
| 78 | RNA binding motif (RNP1, | 102317 | 354480 | 4356 | 346473 | 4709 |
| | RRM) protein 3 | | | | | |
| 79 | RNA binding motif protein 10 | 182872 | 377604 | 4357 | 366829 | 4710 |
| 80 | RNA binding motif protein 10 | 182872 | 329236 | 4358 | 328848 | 4711 |
| 81 | RNA binding motif protein 10 | 182872 | 345781 | 4359 | 329659 | 4712 |
| 82 | RNA binding motif protein 11 | 185272 | 400577 | 4360 | 383421 | 4713 |
| 83 | RNA binding motif protein 12 | 244462 | 359646 | 4361 | 352668 | 4714 |
| 84 | RNA binding motif protein 12 | 244462 | 374104 | 4362 | 363217 | 4715 |
| 85 | RNA binding motif protein 12 | 244462 | 374114 | 4363 | 363228 | 4716 |
| 86 | RNA binding motif protein 12 | 244462 | 431148 | 4364 | 392642 | 4717 |
| 87 | RNA binding motif protein 12 | 244462 | 424458 | 4365 | 411036 | 4718 |
| 88 | RNA binding motif protein 12 | 244462 | 435161 | 4366 | 411692 | 4719 |
| 89 | RNA binding motif protein 12 | 244462 | 349942 | 4367 | 339879 | 4720 |
| 90 | RNA binding motif protein 12B | 183808 | 518597 | 4368 | 428269 | 4721 |
| 91 | RNA binding motif protein 12B | 183808 | 399300 | 4369 | 382239 | 4722 |
| 92 | RNA binding motif protein 12B | 183808 | 520560 | 4370 | 429807 | 4723 |
| 93 | RNA binding motif protein 12B | 183808 | 521947 | 4371 | 430466 | 4724 |
| 94 | RNA binding motif protein 12B | 183808 | 517700 | 4372 | 427729 | 4725 |
| 95 | RNA binding motif protein 12B | 183808 | 519109 | 4373 | 430474 | 4726 |
| 96 | RNA binding motif protein 14 | 239306 | 310137 | 4374 | 311747 | 4727 |
| 97 | RNA binding motif protein 15 | 162775 | 369784 | 4375 | 358799 | 4728 |
| 98 | RNA binding motif protein 15B | 179837 | 323686 | 4376 | 313890 | 4729 |
| 99 | RNA binding motif protein 15B | 179837 | 536338 | 4377 | 444388 | 4730 |
| 100 | RNA binding motif protein 15B | 179837 | 541145 | 4378 | 443941 | 4731 |
| 101 | RNA binding motif protein 15B | 179837 | 540284 | 4379 | 437933 | 4732 |
| 102 | RNA binding motif protein 17 | 134453 | 447032 | 4380 | 406024 | 4733 |
| 103 | RNA binding motif protein 17 | 134453 | 437845 | 4381 | 395448 | 4734 |
| 104 | RNA binding motif protein 17 | 134453 | 372795 | 4382 | 361881 | 4735 |
| 105 | RNA binding motif protein 17 | 134453 | 418631 | 4383 | 402303 | 4736 |
| 106 | RNA binding motif protein 17 | 134453 | 432931 | 4384 | 408214 | 4737 |
| 107 | RNA binding motif protein 17 | 134453 | 379888 | 4385 | 369218 | 4738 |
| 108 | RNA binding motif protein 17 | 134453 | 446108 | 4386 | 388638 | 4739 |
| 109 | RNA binding motif protein 18 | 119446 | 417201 | 4387 | 409315 | 4740 |
| 110 | RNA binding motif protein 19 | 122965 | 545145 | 4388 | 442053 | 4741 |
| 111 | RNA binding motif protein 19 | 122965 | 261741 | 4389 | 261741 | 4742 |
| 112 | RNA binding motif protein 19 | 122965 | 392561 | 4390 | 376344 | 4743 |
| 113 | RNA binding motif protein 20 | 203867 | 539821 | 4391 | 446400 | 4744 |
| 114 | RNA binding motif protein 20 | 203867 | 369519 | 4392 | 358532 | 4745 |
| 115 | RNA binding motif protein 22 | 86589 | 447771 | 4393 | 412118 | 4746 |
| 116 | RNA binding motif protein 22 | 86589 | 199814 | 4394 | 199814 | 4747 |
| 117 | RNA binding motif protein 22 | 86589 | 540000 | 4395 | 441594 | 4748 |
| 118 | RNA binding motif protein 23 | 100461 | 399922 | 4396 | 382806 | 4749 |
| 119 | RNA binding motif protein 23 | 100461 | 359890 | 4397 | 352956 | 4750 |
| 120 | RNA binding motif protein 23 | 100461 | 346528 | 4398 | 339220 | 4751 |
| 121 | RNA binding motif protein 23 | 100461 | 554618 | 4399 | 451448 | 4752 |
| 122 | RNA binding motif protein 23 | 100461 | 553876 | 4400 | 450672 | 4753 |
| 123 | RNA binding motif protein 23 | 100461 | 557571 | 4401 | 452382 | 4754 |
| 124 | RNA binding motif protein 23 | 100461 | 557549 | 4402 | 450558 | 4755 |
| 125 | RNA binding motif protein 23 | 100461 | 338980 | 4403 | 345496 | 4756 |
| 126 | RNA binding motif protein 23 | 100461 | 554256 | 4404 | 452583 | 4757 |
| 127 | RNA binding motif protein 23 | 100461 | 557464 | 4405 | 451403 | 4758 |
| 128 | RNA binding motif protein 23 | 100461 | 555691 | 4406 | 452538 | 4759 |
| 129 | RNA binding motif protein 23 | 100461 | 556862 | 4407 | 452557 | 4760 |
| 130 | RNA binding motif protein 23 | 100461 | 555676 | 4408 | 451364 | 4761 |
| 131 | RNA binding motif protein 24 | 112183 | 379052 | 4409 | 368341 | 4762 |
| 132 | RNA binding motif protein 24 | 112183 | 318204 | 4410 | 319551 | 4763 |
| 133 | RNA binding motif protein 24 | 112183 | 425446 | 4411 | 396898 | 4764 |
| 134 | RNA binding motif protein 25 | 119707 | 525161 | 4412 | 434004 | 4765 |
| 135 | RNA binding motif protein 25 | 119707 | 525321 | 4413 | 436868 | 4766 |
| 136 | RNA binding motif protein 25 | 119707 | 531500 | 4414 | 434333 | 4767 |
| 137 | RNA binding motif protein 25 | 119707 | 261973 | 4415 | 261973 | 4768 |
| 138 | RNA binding motif protein 25 | 119707 | 527432 | 4416 | 431150 | 4769 |
| 139 | RNA binding motif protein 25 | 119707 | 526754 | 4417 | 436225 | 4770 |
| 140 | RNA binding motif protein 25 | 119707 | 540173 | 4418 | 437934 | 4771 |
| 141 | RNA binding motif protein 26 | 139746 | 267229 | 4419 | 267229 | 4772 |
| 142 | RNA binding motif protein 26 | 139746 | 327303 | 4420 | 327080 | 4773 |
| 143 | RNA binding motif protein 26 | 139746 | 438724 | 4421 | 390222 | 4774 |
| 144 | RNA binding motif protein 27 | 91009 | 265271 | 4422 | 265271 | 4775 |
| 145 | RNA binding motif protein 28 | 106344 | 223073 | 4423 | 223073 | 4776 |
| 146 | RNA binding motif protein 33 | 184863 | 438356 | 4424 | 405793 | 4777 |
| 147 | RNA binding motif protein 33 | 184863 | 287912 | 4425 | 287912 | 4778 |
| 148 | RNA binding motif protein 33 | 184863 | 401878 | 4426 | 384160 | 4779 |
| 149 | RNA binding motif protein 33 | 184863 | 341148 | 4427 | 341583 | 4780 |
| 150 | RNA binding motif protein 34 | 188739 | 408888 | 4428 | 386226 | 4781 |
| 151 | RNA binding motif protein 34 | 188739 | 400947 | 4429 | 383731 | 4782 |
| 152 | RNA binding motif protein 34 | 188739 | 429912 | 4430 | 413409 | 4783 |
| 153 | RNA binding motif protein 34 | 188739 | 366606 | 4431 | 355565 | 4784 |
| 154 | RNA binding motif protein 38 | 132819 | 356208 | 4432 | 348538 | 4785 |
| 155 | RNA binding motif protein 38 | 132819 | 440234 | 4433 | 407848 | 4786 |
| 156 | RNA binding motif protein 38 | 132819 | 371219 | 4434 | 360263 | 4787 |
| 157 | RNA binding motif protein 39 | 131051 | 253363 | 4435 | 253363 | 4788 |
| 158 | RNA binding motif protein 39 | 131051 | 407261 | 4436 | 384541 | 4789 |
| 159 | RNA binding motif protein 39 | 131051 | 361162 | 4437 | 354437 | 4790 |
| 160 | RNA binding motif protein 39 | 131051 | 448303 | 4438 | 394824 | 4791 |
| 161 | RNA binding motif protein 39 | 131051 | 374038 | 4439 | 363150 | 4792 |
| 162 | RNA binding motif protein 39 | 131051 | 528062 | 4440 | 436747 | 4793 |
| 163 | RNA binding motif protein 39 | 131051 | 338163 | 4441 | 344581 | 4794 |
| 164 | RNA binding motif protein 39 | 131051 | 434927 | 4442 | 393493 | 4795 |
| 165 | RNA binding motif protein 4 | 173933 | 532968 | 4443 | 432020 | 4796 |
| 166 | RNA binding motif protein 4 | 173933 | 408993 | 4444 | 386561 | 4797 |
| 167 | RNA binding motif protein 4 | 173933 | 409406 | 4445 | 386894 | 4798 |
| 168 | RNA binding motif protein 4 | 173933 | 483858 | 4446 | 435821 | 4799 |
| 169 | RNA binding motif protein 4 | 173933 | 310092 | 4447 | 309166 | 4800 |
| 170 | RNA binding motif protein 41 | 89682 | 434854 | 4448 | 405522 | 4801 |
| 171 | RNA binding motif protein 41 | 89682 | 372479 | 4449 | 361557 | 4802 |
| 172 | RNA binding motif protein 41 | 89682 | 372487 | 4450 | 361565 | 4803 |
| 173 | RNA binding motif protein 41 | 89682 | 372482 | 4451 | 361560 | 4804 |
| 174 | RNA binding motif protein 41 | 89682 | 203616 | 4452 | 203616 | 4805 |
| 175 | RNA binding motif protein 42 | 126254 | 262633 | 4453 | 262633 | 4806 |
| 176 | RNA binding motif protein 42 | 126254 | 360475 | 4454 | 353663 | 4807 |
| 177 | RNA binding motif protein 43 | 184898 | 331426 | 4455 | 331211 | 4808 |
| 178 | RNA binding motif protein 44 | 177483 | 316997 | 4456 | 321179 | 4809 |
| 179 | RNA binding motif protein 44 | 177483 | 409864 | 4457 | 386727 | 4810 |
| 180 | RNA binding motif protein 45 | 155636 | 286070 | 4458 | 286070 | 4811 |
| 181 | RNA binding motif protein 45 | 155636 | 455903 | 4459 | 415940 | 4812 |
| 182 | RNA binding motif protein 46 | 151962 | 281722 | 4460 | 281722 | 4813 |
| 183 | RNA binding motif protein 47 | 163694 | 295971 | 4461 | 295971 | 4814 |
| 184 | RNA binding motif protein 47 | 163694 | 381793 | 4462 | 371212 | 4815 |
| 185 | RNA binding motif protein 47 | 163694 | 511902 | 4463 | 425111 | 4816 |
| 186 | RNA binding motif protein 47 | 163694 | 515053 | 4464 | 422564 | 4817 |
| 187 | RNA binding motif protein 47 | 163694 | 511598 | 4465 | 424019 | 4818 |
| 188 | RNA binding motif protein 47 | 163694 | 513473 | 4466 | 421589 | 4819 |
| 189 | RNA binding motif protein 47 | 163694 | 505414 | 4467 | 423527 | 4820 |
| 190 | RNA binding motif protein 47 | 163694 | 514782 | 4468 | 426542 | 4821 |
| 191 | RNA binding motif protein 47 | 163694 | 319592 | 4469 | 320108 | 4822 |
| 192 | RNA binding motif protein 47 | 163694 | 507180 | 4470 | 423398 | 4823 |
| 193 | RNA binding motif protein 47 | 163694 | 381795 | 4471 | 371214 | 4824 |
| 194 | RNA binding motif protein 47 | 163694 | 505220 | 4472 | 425507 | 4825 |
| 195 | RNA binding motif protein 48 | 127993 | 509224 | 4473 | 442073 | 4826 |
| 196 | RNA binding motif protein 48 | 127993 | 450580 | 4474 | 401920 | 4827 |
| 197 | RNA binding motif protein 48 | 127993 | 265732 | 4475 | 265732 | 4828 |
| 198 | RNA binding motif protein 4B | 173914 | 525754 | 4476 | 433071 | 4829 |
| 199 | RNA binding motif protein 4B | 173914 | 310046 | 4477 | 310471 | 4830 |
| 200 | RNA binding motif protein 5 | 3756 | 469838 | 4478 | 419534 | 4831 |
| 201 | RNA binding motif protein 5 | 3756 | 347869 | 4479 | 343054 | 4832 |
| 202 | RNA binding motif protein 5 | 3756 | 441305 | 4480 | 390711 | 4833 |
| 203 | RNA binding motif protein 5 | 3756 | 543047 | 4481 | 442591 | 4834 |
| 204 | RNA binding motif protein 5 | 3756 | 536082 | 4482 | 445347 | 4835 |
| 205 | RNA binding motif protein 5 | 3756 | 417905 | 4483 | 406119 | 4836 |
| 206 | RNA binding motif protein 5 | 3756 | 437500 | 4484 | 394622 | 4837 |
| 207 | RNA binding motif protein 5 | 3756 | 544851 | 4485 | 439808 | 4838 |
| 208 | RNA binding motif protein 5 | 3756 | 539538 | 4486 | 440744 | 4839 |
| 209 | RNA binding motif protein 6 | 4534 | 422955 | 4487 | 392939 | 4840 |
| 210 | RNA binding motif protein 6 | 4534 | 442092 | 4488 | 393530 | 4841 |
| 211 | RNA binding motif protein 6 | 4534 | 425608 | 4489 | 408665 | 4842 |
| 212 | RNA binding motif protein 6 | 4534 | 443081 | 4490 | 396466 | 4843 |
| 213 | RNA binding motif protein 6 | 4534 | 416583 | 4491 | 390202 | 4844 |
| 214 | RNA binding motif protein 6 | 4534 | 433811 | 4492 | 389763 | 4845 |
| 215 | RNA binding motif protein 6 | 4534 | 539992 | 4493 | 443165 | 4846 |
| 216 | RNA binding motif protein 6 | 4534 | 266022 | 4494 | 266022 | 4847 |
| 217 | RNA binding motif protein 7 | 76053 | 540163 | 4495 | 439918 | 4848 |
| 218 | RNA binding motif protein 8A | 131795 | 369307 | 4496 | 358313 | 4849 |
| 219 | RNA binding motif protein 8A | 131795 | 330165 | 4497 | 333001 | 4850 |
| 220 | RNA binding motif protein, | 147274 | 449161 | 4498 | 415250 | 4851 |
| | X-linked | | | | | |
| 221 | RNA binding motif protein, | 147274 | 320676 | 4499 | 359645 | 4852 |
| | X-linked | | | | | |
| 222 | RNA binding motif protein, | 147274 | 419968 | 4500 | 405117 | 4853 |
| | X-linked | | | | | |
| 223 | RNA binding motif protein, | 147274 | 431446 | 4501 | 411989 | 4854 |
| | X-linked | | | | | |
| 224 | RNA binding motif protein, | 134597 | 305536 | 4502 | 339090 | 4855 |
| | X-linked 2 | | | | | |
| 225 | RNA binding motif protein, | 134597 | 370947 | 4503 | 359985 | 4856 |
| | X-linked 2 | | | | | |
| 226 | RNA binding motif protein, | 134597 | 538614 | 4504 | 437425 | 4857 |
| | X-linked 2 | | | | | |
| 227 | RNA binding motif protein, | 213516 | 399794 | 4505 | 446099 | 4858 |
| | X-linked-like 1 | | | | | |
| 228 | RNA binding motif protein, | 213516 | 321792 | 4506 | 318415 | 4859 |
| | X-linked-like 1 | | | | | |
| 229 | RNA binding motif protein, | 170748 | 306904 | 4507 | 304139 | 4860 |
| | X-linked-like 2 | | | | | |
| 230 | RNA binding motif protein, | 175718 | 424776 | 4508 | 417451 | 4861 |
| | X-linked-like 3 | | | | | |
| 231 | RNA binding motif protein, | 234414 | 382707 | 4509 | 372154 | 4862 |
| | Y-linked, family 1, member A1 | | | | | |
| 232 | RNA binding motif protein, | 234414 | 439108 | 4510 | 388006 | 4863 |
| | Y-linked, family 1, member A1 | | | | | |
| 233 | RNA binding motif protein, | 234414 | 303902 | 4511 | 303712 | 4864 |
| | Y-linked, family 1, member A1 | | | | | |
| 234 | RNA binding motif protein, | 242875 | 383020 | 4512 | 372484 | 4865 |
| | Y-linked, family 1, member B | | | | | |
| 235 | RNA binding motif protein, | 244395 | 418956 | 4513 | 399181 | 4866 |
| | Y-linked, family 1, member D | | | | | |
| 236 | RNA binding motif protein, | 244395 | 382680 | 4514 | 372127 | 4867 |
| | Y-linked, family 1, member D | | | | | |
| 237 | RNA binding motif protein, | 244395 | 382677 | 4515 | 372124 | 4868 |
| | Y-linked, family 1, member D | | | | | |
| 238 | RNA binding motif protein, | 242389 | 382658 | 4516 | 372104 | 4869 |
| | Y-linked, family 1, member E | | | | | |
| 239 | RNA binding motif protein, | 242389 | 382659 | 4517 | 372105 | 4870 |
| | Y-linked, family 1, member E | | | | | |
| 240 | RNA binding motif protein, | 242389 | 382673 | 4518 | 372119 | 4871 |
| | Y-linked, family 1, member E | | | | | |
| 241 | RNA binding motif protein, | 169800 | 303766 | 4519 | 307155 | 4872 |
| | Y-linked, family 1, member F | | | | | |
| 242 | RNA binding motif protein, | 169800 | 454978 | 4520 | 406005 | 4873 |
| | Y-linked, family 1, member F | | | | | |
| 243 | RNA binding motif protein, | 226941 | 414629 | 4521 | 405745 | 4874 |
| | Y-linked, family 1, member J | | | | | |
| 244 | RNA binding motif protein, | 226941 | 250831 | 4522 | 250831 | 4875 |
| | lY-inked, family 1, member J | | | | | |
| 245 | RNA binding motif protein, | 226941 | 445779 | 4523 | 389621 | 4876 |
| | Y-linked, family 1, member J | | | | | |
| 246 | RNA binding motif, single | 153250 | 348849 | 4524 | 294904 | 4877 |
| | stranded interacting protein 1 | | | | | |
| 247 | RNA binding motif, single | 153250 | 428519 | 4525 | 389016 | 4878 |
| | stranded interacting protein 1 | | | | | |
| 248 | RNA binding motif, single | 153250 | 409075 | 4526 | 386347 | 4879 |
| | stranded interacting protein 1 | | | | | |
| 249 | RNA binding motif, single | 153250 | 409972 | 4527 | 387280 | 4880 |
| | stranded interacting protein 1 | | | | | |
| 250 | RNA binding motif, single | 153250 | 392753 | 4528 | 376508 | 4881 |
| | stranded interacting protein 1 | | | | | |
| 251 | RNA binding motif, single | 153250 | 409289 | 4529 | 386571 | 4882 |
| | stranded interacting protein 1 | | | | | |
| 252 | RNA binding motif, single | 76067 | 262031 | 4530 | 262031 | 4883 |
| | stranded interacting protein 2 | | | | | |
| 253 | RNA binding motif, single | 144642 | 434693 | 4531 | 395592 | 4884 |
| | stranded interacting protein 3 | | | | | |
| 254 | RNA binding motif, single | 144642 | 383767 | 4532 | 373277 | 4885 |
| | stranded interacting protein 3 | | | | | |
| 255 | RNA binding motif, single | 144642 | 383766 | 4533 | 373276 | 4886 |
| | stranded interacting protein 3 | | | | | |
| 256 | RNA binding motif, single | 144642 | 456853 | 4534 | 400519 | 4887 |
| | stranded interacting protein 3 | | | | | |
| 257 | RNA binding motif, single | 144642 | 396583 | 4535 | 379828 | 4888 |
| | stranded interacting protein 3 | | | | | |
| 258 | RNA binding motif, single | 144642 | 273139 | 4536 | 273139 | 4889 |
| | stranded interacting protein 3 | | | | | |
| 259 | RNA binding protein S1, | 205937 | 320225 | 4537 | 315859 | 4890 |
| | serine-rich domain | | | | | |
| 260 | RNA binding protein S1, | 205937 | 301730 | 4538 | 301730 | 4891 |
| | serine-rich domain | | | | | |
| 261 | RNA binding protein S1, | 205937 | 397086 | 4539 | 380275 | 4892 |
| | serine-rich domain | | | | | |
| 262 | RNA binding protein with | 157110 | 320203 | 4540 | 318102 | 4893 |
| | multiple splicing | | | | | |
| 263 | RNA binding protein with | 157110 | 287771 | 4541 | 287771 | 4894 |
| | multiple splicing | | | | | |
| 264 | RNA binding protein with | 157110 | 339877 | 4542 | 340176 | 4895 |
| | multiple splicing | | | | | |
| 265 | RNA binding protein with | 157110 | 538486 | 4543 | 445406 | 4896 |
| | multiple splicing | | | | | |
| 266 | RNA binding protein with | 157110 | 397323 | 4544 | 380486 | 4897 |
| | multiple splicing | | | | | |
| 267 | RNA binding protein with | 166831 | 300069 | 4545 | 300069 | 4898 |
| | multiple splicing 2 | | | | | |
| 268 | RNA binding protein, | 125970 | 246194 | 4546 | 246194 | 4899 |
| | autoantigenic (hnRNP- | | | | | |
| | associated with lethal yellow | | | | | |
| | homolog (mouse)) | | | | | |
| 269 | RNA binding protein, | 125970 | 442805 | 4547 | 415973 | 4900 |
| | autoantigenic (hnRNP- | | | | | |
| | associated with lethal yellow | | | | | |
| | homolog (mouse)) | | | | | |
| 270 | RNA binding protein, | 125970 | 448364 | 4548 | 413638 | 4901 |
| | autoantigenic (hnRNP- | | | | | |
| | associated with lethal yellow | | | | | |
| | homolog (mouse)) | | | | | |
| 271 | RNA binding protein, | 125970 | 413297 | 4549 | 403744 | 4902 |
| | autoantigenic (hnRNP- | | | | | |
| | associated with lethal yellow | | | | | |
| | homolog (mouse)) | | | | | |
| 272 | RNA binding protein, | 125970 | 375114 | 4550 | 364255 | 4903 |
| | autoantigenic (hnRNP- | | | | | |
| | associated with lethal yellow | | | | | |
| | homolog (mouse)) | | | | | |
| 273 | RNA binding protein, fox-1 | 78328 | 311745 | 4551 | 309117 | 4904 |
| | homolog (C. elegans) 1 | | | | | |
| 274 | RNA binding protein, fox-1 | 78328 | 550418 | 4552 | 450031 | 4905 |
| | homolog (C. elegans) 1 | | | | | |
| 275 | RNA binding protein, fox-1 | 78328 | 355637 | 4553 | 347855 | 4906 |
| | homolog (C. elegans) 1 | | | | | |
| 276 | RNA binding protein, fox-1 | 78328 | 553186 | 4554 | 447753 | 4907 |
| | homolog (C. elegans) 1 | | | | | |
| 277 | RNA binding protein, fox-1 | 78328 | 436368 | 4555 | 402745 | 4908 |
| | homolog (C. elegans) 1 | | | | | |
| 278 | RNA binding protein, fox-1 | 78328 | 352951 | 4556 | 322925 | 4909 |
| | homolog (C. elegans) 1 | | | | | |
| 279 | RNA binding protein, fox-1 | 78328 | 340209 | 4557 | 344196 | 4910 |
| | homolog (C. elegans) 1 | | | | | |
| 280 | RNA binding protein, fox-1 | 78328 | 547338 | 4558 | 447717 | 4911 |
| | homolog (C. elegans) 1 | | | | | |
| 281 | RNA binding protein, fox-1 | 78328 | 547372 | 4559 | 446842 | 4912 |
| | homolog (C. elegans) 1 | | | | | |
| 282 | RNA binding protein, fox-1 | 78328 | 551752 | 4560 | 447281 | 4913 |
| | homolog (C. elegans) 1 | | | | | |
| 283 | RNA binding protein, fox-1 | 100320 | 397303 | 4561 | 380470 | 4914 |
| | homolog (C. elegans) 2 | | | | | |
| 284 | RNA binding protein, fox-1 | 100320 | 397305 | 4562 | 380472 | 4915 |
| | homolog (C. elegans) 2 | | | | | |
| 285 | RNA binding protein, fox-1 | 100320 | 338644 | 4563 | 342831 | 4916 |
| | homolog (C. elegans) 2 | | | | | |
| 286 | RNA binding protein, fox-1 | 100320 | 408983 | 4564 | 386177 | 4917 |
| | homolog (C. elegans) 2 | | | | | |
| 287 | RNA binding protein, fox-1 | 100320 | 438146 | 4565 | 413035 | 4918 |
| | homolog (C. elegans) 2 | | | | | |
| 288 | RNA binding protein, fox-1 | 100320 | 359369 | 4566 | 352328 | 4919 |
| | homolog (C. elegans) 2 | | | | | |
| 289 | RNA binding protein, fox-1 | 100320 | 262829 | 4567 | 262829 | 4920 |
| | homolog (C. elegans) 2 | | | | | |
| 290 | RNA binding protein, fox-1 | 100320 | 405409 | 4568 | 384944 | 4921 |
| | homolog (C. elegans) 2 | | | | | |
| 291 | RNA binding protein, fox-1 | 100320 | 449924 | 4569 | 391670 | 4922 |
| | homolog (C. elegans) 2 | | | | | |
| 292 | RNA binding protein, fox-1 | 100320 | 414461 | 4570 | 407855 | 4923 |
| | homolog (C. elegans) 2 | | | | | |
| 293 | RNA binding protein, fox-1 | 100320 | 416721 | 4571 | 405651 | 4924 |
| | homolog (C. elegans) 2 | | | | | |
| 294 | RNA binding protein, fox-1 | 167281 | 415831 | 4572 | 408395 | 4925 |
| | homolog (C. elegans) 3 | | | | | |
| 295 | RNA binding protein, fox-1 | 167281 | 453134 | 4573 | 393262 | 4926 |
| | homolog (C. elegans) 3 | | | | | |
| 296 | S1 RNA binding domain 1 | 68784 | 535761 | 4574 | 263736 | 4927 |
| 297 | S1 RNA binding domain 1 | 68784 | 263736 | 4575 | 441272 | 4928 |
| 298 | SERPINE1 mRNA binding | 142864 | 370995 | 4576 | 360034 | 4929 |
| | protein 1 | | | | | |
| 299 | SERPINE1 mRNA binding | 142864 | 361219 | 4577 | 354591 | 4930 |
| | protein 1 | | | | | |
| 300 | SERPINE1 mRNA binding | 142864 | 370994 | 4578 | 360033 | 4931 |
| | protein 1 | | | | | |
| 301 | SERPINE1 mRNA binding | 142864 | 370990 | 4579 | 360029 | 4932 |
| | protein 1 | | | | | |
| 302 | signal recognition particle 14 kDa | 140319 | 267884 | 4580 | 267884 | 4933 |
| | (homologous Alu RNA binding | | | | | |
| | protein) | | | | | |
| 303 | spermatid perinuclear RNA | 165209 | 407982 | 4581 | 384292 | 4934 |
| | binding protein | | | | | |
| 304 | spermatid perinuclear RNA | 165209 | 348403 | 4582 | 321347 | 4935 |
| | binding protein | | | | | |
| 305 | spermatid perinuclear RNA | 165209 | 479114 | 4583 | 431531 | 4936 |
| | binding protein | | | | | |
| 306 | spermatid perinuclear RNA | 165209 | 447404 | 4584 | 415968 | 4937 |
| | binding protein | | | | | |
| 307 | spermatid perinuclear RNA | 165209 | 360998 | 4585 | 354271 | 4938 |
| | binding protein | | | | | |
| 308 | SRA stem-loop interacting RNA | 119705 | 557342 | 4586 | 450909 | 4939 |
| | binding protein | | | | | |
| 309 | staufen, RNA binding protein, | 124214 | 371856 | 4587 | 360922 | 4940 |
| | homolog 1 (Drosophila) | | | | | |
| 310 | staufen, RNA binding protein, | 124214 | 360426 | 4588 | 353604 | 4941 |
| | homolog 1 (Drosophila) | | | | | |
| 311 | staufen, RNA binding protein, | 124214 | 371828 | 4589 | 360893 | 4942 |
| | homolog 1 (Drosophila) | | | | | |
| 312 | staufen, RNA binding protein, | 124214 | 371805 | 4590 | 360870 | 4943 |
| | homolog 1 (Drosophila) | | | | | |
| 313 | staufen, RNA binding protein, | 124214 | 371802 | 4591 | 360867 | 4944 |
| | homolog 1 (Drosophila) | | | | | |
| 314 | staufen, RNA binding protein, | 124214 | 456866 | 4592 | 398785 | 4945 |
| | homolog 1 (Drosophila) | | | | | |
| 315 | staufen, RNA binding protein, | 124214 | 347458 | 4593 | 323443 | 4946 |
| | homolog 1 (Drosophila) | | | | | |
| 316 | staufen, RNA binding protein, | 124214 | 340954 | 4594 | 345425 | 4947 |
| | homolog 1 (Drosophila) | | | | | |
| 317 | staufen, RNA binding protein, | 124214 | 371792 | 4595 | 360857 | 4948 |
| | homolog 1 (Drosophila) | | | | | |
| 318 | staufen, RNA binding protein, | 124214 | 437404 | 4596 | 416779 | 4949 |
| | homolog 1 (Drosophila) | | | | | |
| 319 | staufen, RNA binding protein, | 40341 | 355780 | 4597 | 348026 | 4950 |
| | homolog 2 (Drosophila) | | | | | |
| 320 | staufen, RNA binding protein, | 40341 | 524300 | 4598 | 428756 | 4951 |
| | homolog 2 (Drosophila) | | | | | |
| 321 | staufen, RNA binding protein, | 40341 | 524104 | 4599 | 430611 | 4952 |
| | homolog 2 (Drosophila) | | | | | |
| 322 | staufen, RNA binding protein, | 40341 | 522695 | 4600 | 428456 | 4953 |
| | homolog 2 (Drosophila) | | | | | |
| 323 | staufen, RNA binding protein, | 40341 | 522509 | 4601 | 427977 | 4954 |
| | homolog 2 (Drosophila) | | | | | |
| 324 | staufen, RNA binding protein, | 40341 | 521736 | 4602 | 428737 | 4955 |
| | homolog 2 (Drosophila) | | | | | |
| 325 | staufen, RNA binding protein, | 40341 | 521447 | 4603 | 428829 | 4956 |
| | homolog 2 (Drosophila) | | | | | |
| 326 | TAR (HIV-1) RNA binding | 59588 | 40877 | 4604 | 40877 | 4957 |
| | protein 1 | | | | | |
| 327 | TAR (HIV-1) RNA binding | 139546 | 456234 | 4605 | 416077 | 4958 |
| | protein 2 | | | | | |
| 328 | TAR (HIV-1) RNA binding | 139546 | 266987 | 4606 | 266987 | 4959 |
| | protein 2 | | | | | |
| 329 | TIA1 cytotoxic granule- | 116001 | 433529 | 4607 | 401371 | 4960 |
| | associated RNA binding protein | | | | | |
| 330 | TIA1 cytotoxic granule- | 116001 | 477807 | 4608 | 445092 | 4961 |
| | associated RNA binding protein | | | | | |
| 331 | TIA1 cytotoxic granule- | 116001 | 415783 | 4609 | 404023 | 4962 |
| | associated RNA binding protein | | | | | |
| 332 | TIA1 cytotoxic granule- | 151923 | 412524 | 4610 | 403573 | 4963 |
| | associated RNA binding protein- | | | | | |
| | like 1 | | | | | |
| 333 | TIA1 cytotoxic granule- | 151923 | 436547 | 4611 | 394902 | 4964 |
| | associated RNA binding protein- | | | | | |
| | like 1 | | | | | |
| 334 | TIA1 cytotoxic granule- | 151923 | 369086 | 4612 | 358082 | 4965 |
| | associated RNA binding protein- | | | | | |
| | like 1 | | | | | |
| 335 | TIA1 cytotoxic granule- | 151923 | 369093 | 4613 | 358089 | 4966 |
| | associated RNA binding protein- | | | | | |
| | like 1 | | | | | |
| 336 | TIA1 cytotoxic granule- | 151923 | 369092 | 4614 | 358088 | 4967 |
| | associated RNA binding protein- | | | | | |
| | like 1 | | | | | |
| 337 | zinc finger CCHC-type and RNA | 139168 | 266529 | 4615 | 266529 | 4968 |
| | binding motif 1 | | | | | |
| 338 | zinc finger RNA binding protein | 56097 | 265069 | 4616 | 265069 | 4969 |
| 339 | zinc finger RNA binding protein | 56097 | 416900 | 4617 | 393243 | 4970 |
| 340 | zinc finger RNA binding protein | 56097 | 382126 | 4618 | 371560 | 4971 |
| 341 | zinc finger RNA binding | 105278 | 439086 | 4619 | 388567 | 4972 |
| | protein 2 | | | | | |
| 342 | zinc finger RNA binding | 105278 | 262961 | 4620 | 262961 | 4973 |
| | protein 2 | | | | | |
| 343 | zinc finger RNA binding | 105278 | 438164 | 4621 | 388974 | 4974 |
| | protein 2 | | | | | |
| 344 | cold shock domain containing | 9307 | 261443 | 4622 | 261443 | 4975 |
| | E1, RNA-binding | | | | | |
| 345 | cold shock domain containing | 9307 | 339438 | 4623 | 342408 | 4976 |
| | E1, RNA-binding | | | | | |
| 346 | cold shock domain containing | 9307 | 358528 | 4624 | 351329 | 4977 |
| | E1, RNA-binding | | | | | |
| 347 | cold shock domain containing | 9307 | 369530 | 4625 | 358543 | 4978 |
| | E1, RNA-binding | | | | | |
| 348 | cold shock domain containing | 9307 | 438362 | 4626 | 407724 | 4979 |
| | E1, RNA-binding | | | | | |
| 349 | cold shock domain containing | 9307 | 525878 | 4627 | 431562 | 4980 |
| | E1, RNA-binding | | | | | |
| 350 | cold shock domain containing | 9307 | 525970 | 4628 | 432805 | 4981 |
| | E1, RNA-binding | | | | | |
| 351 | cold shock domain containing | 9307 | 530886 | 4629 | 431297 | 4982 |
| | E1, RNA-binding | | | | | |
| 352 | cold shock domain containing | 9307 | 534389 | 4630 | 435185 | 4983 |
| | E1, RNA-binding | | | | | |
| 353 | cold shock domain containing | 9307 | 534699 | 4631 | 432958 | 4984 |
| | E1, RNA-binding | | | | | |

[1004] HuR is a stabilizing AREBP. To increase the stability of the mRNA of interest, an mRNA encoding HuR can be co-transfected or co-injected along with the mRNA of interest into the cells or into the tissue. These proteins can also be tethered to the mRNA of interest in vitro and then administered to the cells together. Poly A tail binding protein, PABP interacts with eukaryotic translation initiation factor eIF4G to stimulate translational initiation. Co-administration of mRNAs encoding these RBPs along with the mRNA drug and/or tethering these proteins to the mRNA drug in vitro and administering the protein-bound mRNA into the cells can increase the translational efficiency of the mRNA. The same concept can be extended to co-administration of mRNA along with mRNAs encoding various translation factors and facilitators as well as with the proteins themselves to influence RNA stability and/or translational efficiency.

### Example 24. Expression of Modified Nucleic Acid with microRNA Binding Site

[1005] Human embryonic kidney epithelial cells (HEK293A), antigen presenting cells or cell lines with highly expressed mir-142/146, such as monocyte-derived dendritic cells (MDDC) or PBMC, are seeded at a density of 200,000 per well in 500 ul cell culture medium (InVitro GRO medium from Celsis, Chicago, IL). G-CSF mRNA (mRNA sequence is shown in SEQ ID NO: 4258; polyA tail of at least 140 nucleotides not shown in sequence; 5′Cap, Cap1) G-CSF mRNA having a miR-142-5p binding site (G-CSF miR-142-5p) (cDNA sequence is shown in SEQ ID NO: 4985; mRNA sequence is shown in SEQ ID NO: 4986, polyA tail of at least 140 nucleotides not shown in sequence; 5′Cap, Cap1), G-CSF mRNA having a seed sequence from miR-142-5p binding site (G-CSF miR-142-5p-seed) (cDNA sequence is shown in SEQ ID NO: 4987; mRNA sequence is shown in SEQ ID NO: 4988; polyA tail of at least 140 nucleotides not shown in sequence; 5′Cap, Cap1) G-CSF mRNA having a miR-142-5p binding site without the seed sequence (G-CSF miR-142-5p-seedless) (cDNA sequence is shown in SEQ ID NO: 4989, mRNA sequence is shown in SEQ ID NO: 4990; polyA tail of at least 140 nucleotides not shown in sequence; 5′Cap, Cap1) G-CSF mRNA having a miR-142-3p binding site (G-CSF miR-142-3p) (cDNA sequence is shown in SEQ ID NO: 4991; mRNA sequence is shown in SEQ ID NO: 4992; polyA tail of at least 140 nucleotides not shown in sequence; 5′Cap, Cap1) G-CSF mRNA having a seed sequence from miR-142-3p binding site (G-CSF miR-142-3p-seed) (cDNA sequence is shown in SEQ ID NO: 4993; mRNA sequence is shown in SEQ ID NO: 4994; polyA tail of at least 140 nucleotides not shown in sequence; 5′Cap, Cap1) G-CSF mRNA having a miR-142-3p binding site without the seed sequence (G-CSF miR-142-3p-seedless) (DNA sequence is shown in SEQ ID NO: 4995; mRNA sequence is shown in SEQ ID NO: 4996; polyA tail of at least 140 nucleotides not shown in sequence; 5′Cap, Cap1) G-CSF mRNA having a miR-146a binding site (G-CSF miR-146a) (cDNA sequence is shown in SEQ ID NO: 4997; mRNA sequence is shown in SEQ ID NO: 4998; polyA tail of at least 140 nucleotides not shown in sequence; 5′Cap, Cap1) G-CSF mRNA having a seed sequence from miR-146a binding site (G-CSF miR-146a-seed) (cDNA sequence is shown in SEQ ID NO:4999; mRNA sequence is shown in SEQ ID NO: 5000; polyA tail at least 140 nucleotides not shown in sequence; 5′Cap,Cap1) or G-CSF mRNA having a miR-146a binding site without the seed sequence (G-CSF miR-146a-seedless) (cDNA sequence is shown in SEQ ID NO: 5001; mRNA sequence is shown in SEQ ID NO: 5002; polyA tail at least nucleotides not shown in sequence; 5′Cap, Cap1) are tested at a concentration of 250 ng per well in 24 well plates. The mRNA sequences are evaluated with various chemical modifications described herein and/or known in the art including, fully modified with 5-methylcytidine and pseudouridine, fully modified with 5-methylcytidine and 1-methylpseudouridine, fully modified with pseudouridine, fully modified with 1-methylpseudouridine and where 25% of the uridine residues are modified with 2-thiouridine and 25% of the cytosine residues are modified with 5-methylcytidine. The expression of G-CSF in each sample is measured by ELISA.

[1006] Shown in Table 27 are the DNA and mRNA G-CSF sequences with the miR binding sites described above. In the table, the start codon of each sequence is underlined.

TABLE 27
G-CSF Constructs with miR binding sites

| SEQ | | |
|---|---|---|
| ID | | |
| NO. | Description | SEQ |
| 4985 | DNA | TAATACGACTCACTATA |
| | sequence | GGGAAATAAGAGAGAAAAGAAGAGTAAGAAGAAATATAAGAG |
| | having the | CCACCATGGCCGGTCCCGCGACCCAAAGCCCCATGAAACTTAT |
| | T7 | GGCCCTGCAGTTGCTGCTTTGGCACTCGGCCCTCTGGACAGTCC |
| | polymerase | AAGAAGCGACTCCTCTCGGACCTGCCTCATCGTTGCCGCAGTCA |
| | site and | TTCCTTTTGAAGTGTCTGGAGCAGGTGCGAAAGATTCAGGGCG |
| | restriction | ATGGAGCCGCACTCCAAGAGAAGCTCTGCGCGACATACAAACT |
| | sites: | TTGCCATCCCGAGGAGCTCGTACTGCTCGGGCACAGCTTGGGG |
| | G-CSF miR- | ATTCCCTGGGCTCCTCTCTCGTCCTGTCCGTCGCAGGCTTTGCA |
| | 142-5p | GTTGGCAGGGTGCCTTTCCCAGCTCCACTCCGGTTTGTTCTTGT |
| | | ATCAGGGACTGCTGCAAGCCCTTGAGGGAATCTCGCCAGAATT |
| | | GGGCCCGACGCTGGACACGTTGCAGCTCGACGTGGCGGATTTC |
| | | GCAACAACCATCTGGCAGCAGATGGAGGAACTGGGGATGGCAC |
| | | CCGCGCTGCAGCCCACGCAGGGGGCAATGCCGGCCTTTGCGTC |
| | | CGCGTTTCAGCGCAGGGCGGGTGGAGTCCTCGTAGCGAGCCAC |
| | | CTTCAATCATTTTTGGAAGTCTCGTACCGGGTGCTGAGACATCT |
| | | TGCGCAGCCGTGATAATAGGCTGCCTTCTGCGGGGCTTGCCTTC |
| | | TGGCCATGCCCTTCTTCTCTCCCTTGCACCTGTACCTCTAGTAGT |
| | | GCTTTCTACTTTATGTGGTCTTTGAATAAAGCCTGAGTAGGAAG |
| | | GCGGCCGCTCGAGCATGCATCTAGA |
| 4986 | mRNA | GGGAAAUAAGAGAGAAAAGAAGAGUAAGAAGAAAUAUAAGA |
| | sequence: | GCCACCAUGGCCGGUCCCGCGACCCAAAGCCCCAUGAAACUU |
| | G-CSF miR- | AUGGCCCUGCAGUUGCUGCUUUGGCACUCGGCCCUCUGGACA |
| | 142-5p | GUCCAAGAAGCGACUCCUCUCGGACCUGCCUCAUCGUUGCCG |
| | | CAGUCAUUCCUUUUGAAGUGUCUGGAGCAGGUGCGAAAGAUU |
| | | CAGGGCGAUGGAGCCGCACUCCAAGAGAAGCUCUGCGCGACA |
| | | UACAAACUUUGCCAUCCCGAGGAGCUCGUACUGCUCGGGCAC |
| | | AGCUUGGGGAUUCCCUGGGCUCCUCUCUCGUCCUGUCCGUCG |
| | | CAGGCUUUGCAGUUGGCAGGGUGCCUUUCCCAGCUCCACUCC |
| | | GGUUUGUUCUUGUAUCAGGGACUGCUGCAAGCCCUUGAGGGA |
| | | AUCUCGCCAGAAUUGGGCCCGACGCUGGACACGUUGCAGCUC |
| | | GACGUGGCGGAUUUCGCAACAACCAUCUGGCAGCAGAUGGAG |
| | | GAACUGGGGAUGGCACCCGCGCUGCAGCCCACGCAGGGGGCA |
| | | AUGCCGGCCUUUGCGUCCGCGUUUCAGCGCAGGGCGGGUGGA |
| | | GUCCUCGUAGCGAGCCACCUUCAAUCAUUUUUGGAAGUCUCG |
| | | UACCGGGUGCUGAGACAUCUUGCGCAGCCGUGAUAAUAGGCU |
| | | GCCUUCUGCGGGGCUUGCCUUCUGGCCAUGCCCUUCUUCUCU |
| | | CCCUUGCACCUGUACCUCUAGUAGUGCUUUCUACUUUAUGUG |
| | | GUCUUUGAAUAAAGCCUGAGUAGGAAG |
| 4987 | DNA | TAATACGACTCACTATA |
| | sequence | GGGAAATAAGAGAGAAAAGAAGAGTAAGAAGAAATATAAGAG |
| | having the | CCACCATGGCCGGTCCCGCGACCCAAAGCCCCATGAAACTTAT |
| | T7 | GGCCCTGCAGTTGCTGCTTTGGCACTCGGCCCTCTGGACAGTCC |
| | polymerase | AAGAAGCGACTCCTCTCGGACCTGCCTCATCGTTGCCGCAGTCA |
| | site and | TTCCTTTTGAAGTGTCTGGAGCAGGTGCGAAAGATTCAGGGCG |
| | restriction | ATGGAGCCGCACTCCAAGAGAAGCTCTGCGCGACATACAAACT |
| | sites: | TTGCCATCCCGAGGAGCTCGTACTGCTCGGGCACAGCTTGGGG |
| | G-CSF miR- | ATTCCCTGGGCTCCTCTCTCGTCCTGTCCGTCGCAGGCTTTGCA |
| | 142-5p-seed | GTTGGCAGGGTGCCTTTCCCAGCTCCACTCCGGTTTGTTCTTGT |
| | | ATCAGGGACTGCTGCAAGCCCTTGAGGGAATCTCGCCAGAATT |
| | | GGGCCCGACGCTGGACACGTTGCAGCTCGACGTGGCGGATTTC |
| | | GCAACAACCATCTGGCAGCAGATGGAGGAACTGGGGATGGCAC |
| | | CCGCGCTGCAGCCCACGCAGGGGGCAATGCCGGCCTTTGCGTC |
| | | CGCGTTTCAGCGCAGGGCGGGTGGAGTCCTCGTAGCGAGCCAC |
| | | CTTCAATCATTTTTGGAAGTCTCGTACCGGGTGCTGAGACATCT |
| | | TGCGCAGCCGTGATAATAGGCTGCCTTCTGCGGGGCTTGCCTTC |
| | | TGGCCATGCCCTTCTTCTCTCCCTTGCACCTGTACCTCTACTTTA |
| | | TTGGTCTTTGAATAAAGCCTGAGTAGGAAGGCGGCCGCTCGA |
| | | GCATGCATCTAGA |
| 4988 | mRNA | GGGAAAUAAGAGAGAAAAGAAGAGUAAGAAGAAAUAUAAGA |
| | sequence: | GCCACC |
| | G-CSF miR- | AUGGCCGGUCCCGCGACCCAAAGCCCCAUGAAACUUAUGGCC |
| | 142-5p-seed | CUGCAGUUGCUGCUUUGGCACUCGGCCCUCUGGACAGUCCAA |
| | | GAAGCGACUCCUCUCGGACCUGCCUCAUCGUUGCCGCAGUCA |
| | | UUCCUUUUGAAGUGUCUGGAGCAGGUGCGAAAGAUUCAGGGC |
| | | GAUGGAGCCGCACUCCAAGAGAAGCUCUGCGCGACAUACAAA |
| | | CUUUGCCAUCCCGAGGAGCUCGUACUGCUCGGGCACAGCUUG |
| | | GGGAUUCCCUGGGCUCCUCUCUCGUCCUGUCCGUCGCAGGCU |
| | | UUGCAGUUGGCAGGGUGCCUUUCCCAGCUCCACUCCGGUUUG |
| | | UUCUUGUAUCAGGGACUGCUGCAAGCCCUUGAGGGAAUCUCG |
| | | CCAGAAUUGGGCCCGACGCUGGACACGUUGCAGCUCGACGUG |
| | | GCGGAUUUCGCAACAACCAUCUGGCAGCAGAUGGAGGAACUG |
| | | GGGAUGGCACCCGCGCUGCAGCCCACGCAGGGGGCAAUGCCG |
| | | GCCUUUGCGUCCGCGUUUCAGCGCAGGGCGGGUGGAGUCCUC |
| | | GUAGCGAGCCACCUUCAAUCAUUUUUGGAAGUCUCGUACCGG |
| | | GUGCUGAGACAUCUUGCGCAGCCG |
| | | UGAUAAUAGGCUGCCUUCUGCGGGGCUUGCCUUCUGGCCAUG |
| | | CCCUUCUUCUCUCCCUUGCACCUGUACCUCUACUUUAUUGGU |
| | | CUUUGAAUAAAGCCUGAGUAGGAAG |
| 4989 | DNA | TAATACGACTCACTATA |
| | sequence | GGGAAATAAGAGAGAAAAGAAGAGTAAGAAGAAATATAAGAG |
| | having the | CCACCATGGCCGGTCCCGCGACCCAAAGCCCCATGAAACTTAT |
| | T7 | GGCCCTGCAGTTGCTGCTTTGGCACTCGGCCCTCTGGACAGTCC |
| | polymerase | AAGAAGCGACTCCTCTCGGACCTGCCTCATCGTTGCCGCAGTCA |
| | site and | TTCCTTTTGAAGTGTCTGGAGCAGGTGCGAAAGATTCAGGGCG |
| | restriction | ATGGAGCCGCACTCCAAGAGAAGCTCTGCGCGACATACAAACT |
| | sites: | TTGCCATCCCGAGGAGCTCGTACTGCTCGGGCACAGCTTGGGG |
| | G-CSF miR- | ATTCCCTGGGCTCCTCTCTCGTCCTGTCCGTCGCAGGCTTTGCA |
| | 142-5p- | GTTGGCAGGGTGCCTTTCCCAGCTCCACTCCGGTTTGTTCTTGT |
| | seedless | ATCAGGGACTGCTGCAAGCCCTTGAGGGAATCTCGCCAGAATT |
| | | GGGCCCGACGCTGGACACGTTGCAGCTCGACGTGGCGGATTTC |
| | | GCAACAACCATCTGGCAGCAGATGGAGGAACTGGGGATGGCAC |
| | | CCGCGCTGCAGCCCACGCAGGGGGCAATGCCGGCCTTTGCGTC |
| | | CGCGTTTCAGCGCAGGGCGGGTGGAGTCCTCGTAGCGAGCCAC |
| | | CTTCAATCATTTTTGGAAGTCTCGTACCGGGTGCTGAGACATCT |
| | | TGCGCAGCCGTGATAATAGGCTGCCTTCTGCGGGGCTTGCCTTC |
| | | TGGCCATGCCCTTCTTCTCTCCCTTGCACCTGTACCTCTAGTAGT |
| | | GCTTTCTGTGGTCTTTGAATAAAGCCTGAGTAGGAAGGCGGCC |
| | | GCTCGAGCATGCATCTAGA |
| 4990 | mRNA | GGGAAAUAAGAGAGAAAAGAAGAGUAAGAAGAAAUAUAAGA |
| | sequence: | GCCACC |
| | G-CSF miR- | AUGGCCGGUCCCGCGACCCAAAGCCCCAUGAAACUUAUGGCC |
| | 142-5p- | CUGCAGUUGCUGCUUUGGCACUCGGCCCUCUGGACAGUCCAA |
| | seedless | GAAGCGACUCCUCUCGGACCUGCCUCAUCGUUGCCGCAGUCA |
| | | UUCCUUUUGAAGUGUCUGGAGCAGGUGCGAAAGAUUCAGGGC |
| | | GAUGGAGCCGCACUCCAAGAGAAGCUCUGCGCGACAUACAAA |
| | | CUUUGCCAUCCCGAGGAGCUCGUACUGCUCGGGCACAGCUUG |
| | | GGGAUUCCCUGGGCUCCUCUCUCGUCCUGUCCGUCGCAGGCU |
| | | UUGCAGUUGGCAGGGUGCCUUUCCCAGCUCCACUCCGGUUUG |
| | | UUCUUGUAUCAGGGACUGCUGCAAGCCCUUGAGGGAAUCUCG |
| | | CCAGAAUUGGGCCCGACGCUGGACACGUUGCAGCUCGACGUG |
| | | GCGGAUUUCGCAACAACCAUCUGGCAGCAGAUGGAGGAACUG |
| | | GGGAUGGCACCCGCGCUGCAGCCCACGCAGGGGGCAAUGCCG |
| | | GCCUUUGCGUCCGCGUUUCAGCGCAGGGCGGGUGGAGUCCUC |
| | | GUAGCGAGCCACCUUCAAUCAUUUUUGGAAGUCUCGUACCGG |
| | | GUGCUGAGACAUCUUGCGCAGCCG |
| | | UGAUAAUAGGCUGCCUUCUGCGGGGCUUGCCUUCUGGCCAUG |
| | | CCCUUCUUCUCUCCCUUGCACCUGUACCUCUAGUAGUGCUUU |
| | | CUGUGGUCUUUGAAUAAAGCCUGAGUAGGAAG |
| 4991 | DNA | TAATACGACTCACTATA |
| | sequence | GGGAAATAAGAGAGAAAAGAAGAGTAAGAAGAAATATAAGAG |
| | having the | CCACCATGGCCGGTCCCGCGACCCAAAGCCCCATGAAACTTAT |
| | T7 | GGCCCTGCAGTTGCTGCTTTGGCACTCGGCCCTCTGGACAGTCC |
| | polymerase | AAGAAGCGACTCCTCTCGGACCTGCCTCATCGTTGCCGCAGTCA |
| | site and | TTCCTTTTGAAGTGTCTGGAGCAGGTGCGAAAGATTCAGGGCG |
| | restriction | ATGGAGCCGCACTCCAAGAGAAGCTCTGCGCGACATACAAACT |
| | sites: | TTGCCATCCCGAGGAGCTCGTACTGCTCGGGCACAGCTTGGGG |
| | G-CSF miR- | ATTCCCTGGGCTCCTCTCTCGTCCTGTCCGTCGCAGGCTTTGCA |
| | 142-3p | GTTGGCAGGGTGCCTTTCCCAGCTCCACTCCGGTTTGTTCTTGT |
| | | ATCAGGGACTGCTGCAAGCCCTTGAGGGAATCTCGCCAGAATT |
| | | GGGCCCGACGCTGGACACGTTGCAGCTCGACGTGGCGGATTTC |
| | | GCAACAACCATCTGGCAGCAGATGGAGGAACTGGGGATGGCAC |
| | | CCGCGCTGCAGCCCACGCAGGGGGCAATGCCGGCCTTTGCGTC |
| | | CGCGTTTCAGCGCAGGGCGGGTGGAGTCCTCGTAGCGAGCCAC |
| | | CTTCAATCATTTTTGGAAGTCTCGTACCGGGTGCTGAGACATCT |
| | | TGCGCAGCCGTGATAATAGGCTGCCTTCTGCGGGGCTTGCCTTC |
| | | TGGCCATGCCCTTCTTCTCTCCCTTGCACCTGTACCTCTTCCATA |
| | | AAGTAGGAAACACTACATGGTCTTTGAATAAAGCCTGAGTAGG |
| | | AAGGCGGCCGCTCGAGCATGCATCTAGA |
| 4992 | mRNA | GGGAAAUAAGAGAGAAAAGAAGAGUAAGAAGAAAUAUAAGA |
| | sequence: | GCCACC |
| | G-CSF miR- | AUGGCCGGUCCCGCGACCCAAAGCCCCAUGAAACUUAUGGCC |
| | 142-3p | CUGCAGUUGCUGCUUUGGCACUCGGCCCUCUGGACAGUCCAA |
| | | GAAGCGACUCCUCUCGGACCUGCCUCAUCGUUGCCGCAGUCA |
| | | UUCCUUUUGAAGUGUCUGGAGCAGGUGCGAAAGAUUCAGGGC |
| | | GAUGGAGCCGCACUCCAAGAGAAGCUCUGCGCGACAUACAAA |
| | | CUUUGCCAUCCCGAGGAGCUCGUACUGCUCGGGCACAGCUUG |
| | | GGGAUUCCCUGGGCUCCUCUCUCGUCCUGUCCGUCGCAGGCU |
| | | UUGCAGUUGGCAGGGUGCCUUUCCCAGCUCCACUCCGGUUUG |
| | | UUCUUGUAUCAGGGACUGCUGCAAGCCCUUGAGGGAAUCUCG |
| | | CCAGAAUUGGGCCCGACGCUGGACACGUUGCAGCUCGACGUG |
| | | GCGGAUUUCGCAACAACCAUCUGGCAGCAGAUGGAGGAACUG |
| | | GGGAUGGCACCCGCGCUGCAGCCCACGCAGGGGGCAAUGCCG |
| | | GCCUUUGCGUCCGCGUUUCAGCGCAGGGCGGGUGGAGUCCUC |
| | | GUAGCGAGCCACCUUCAAUCAUUUUUGGAAGUCUCGUACCGG |
| | | GUGCUGAGACAUCUUGCGCAGCCG |
| | | UGAUAAUAGGCUGCCUUCUGCGGGGCUUGCCUUCUGGCCAUG |
| | | CCCUUCUUCUCUCCCUUGCACCUGUACCUCUUCCAUAAAGUA |
| | | GGAAACACUACAUGGUCUUUGAAUAAAGCCUGAGUAGGAAG |
| 4993 | DNA | TAATACGACTCACTATA |
| | sequence | GGGAAATAAGAGAGAAAAGAAGAGTAAGAAGAAATATAAGAG |
| | having the | CCACCATGGCCGGTCCCGCGACCCAAAGCCCCATGAAACTTAT |
| | T7 | GGCCCTGCAGTTGCTGCTTTGGCACTCGGCCCTCTGGACAGTCC |
| | polymerase | AAGAAGCGACTCCTCTCGGACCTGCCTCATCGTTGCCGCAGTCA |
| | site and | TTCCTTTTGAAGTGTCTGGAGCAGGTGCGAAAGATTCAGGGCG |
| | restriction | ATGGAGCCGCACTCCAAGAGAAGCTCTGCGCGACATACAAACT |
| | sites: | TTGCCATCCCGAGGAGCTCGTACTGCTCGGGCACAGCTTGGGG |
| | G-CSF miR- | ATTCCCTGGGCTCCTCTCTCGTCCTGTCCGTCGCAGGCTTTGCA |
| | 142-3p-seed | GTTGGCAGGGTGCCTTTCCCAGCTCCACTCCGGTTTGTTCTTGT |
| | | ATCAGGGACTGCTGCAAGCCCTTGAGGGAATCTCGCCAGAATT |
| | | GGGCCCGACGCTGGACACGTTGCAGCTCGACGTGGCGGATTTC |
| | | GCAACAACCATCTGGCAGCAGATGGAGGAACTGGGGATGGCAC |
| | | CCGCGCTGCAGCCCACGCAGGGGGCAATGCCGGCCTTTGCGTC |
| | | CGCGTTTCAGCGCAGGGCGGGTGGAGTCCTCGTAGCGAGCCAC |
| | | CTTCAATCATTTTTGGAAGTCTCGTACCGGGTGCTGAGACATCT |
| | | TGCGCAGCCGTGATAATAGGCTGCCTTCTGCGGGGCTTGCCTTC |
| | | TGGCCATGCCCTTCTTCTCTCCCTTGCACCTGTACCTCTACACTA |
| | | CTGGTCTTTGAATAAAGCCTGAGTAGGAAGGCGGCCGCTCGA |
| | | GCATGCATCTAGA |
| 4994 | mRNA | GGGAAAUAAGAGAGAAAAGAAGAGUAAGAAGAAAUAUAAGA |
| | sequence: | GCCACC |
| | G-CSF miR- | AUGGCCGGUCCCGCGACCCAAAGCCCCAUGAAACUUAUGGCC |
| | 142-3p-seed | CUGCAGUUGCUGCUUUGGCACUCGGCCCUCUGGACAGUCCAA |
| | | GAAGCGACUCCUCUCGGACCUGCCUCAUCGUUGCCGCAGUCA |
| | | UUCCUUUUGAAGUGUCUGGAGCAGGUGCGAAAGAUUCAGGGC |
| | | GAUGGAGCCGCACUCCAAGAGAAGCUCUGCGCGACAUACAAA |
| | | CUUUGCCAUCCCGAGGAGCUCGUACUGCUCGGGCACAGCUUG |
| | | GGGAUUCCCUGGGCUCCUCUCUCGUCCUGUCCGUCGCAGGCU |
| | | UUGCAGUUGGCAGGGUGCCUUUCCCAGCUCCACUCCGGUUUG |
| | | UUCUUGUAUCAGGGACUGCUGCAAGCCCUUGAGGGAAUCUCG |
| | | CCAGAAUUGGGCCCGACGCUGGACACGUUGCAGCUCGACGUG |
| | | GCGGAUUUCGCAACAACCAUCUGGCAGCAGAUGGAGGAACUG |
| | | GGGAUGGCACCCGCGCUGCAGCCCACGCAGGGGGCAAUGCCG |
| | | GCCUUUGCGUCCGCGUUUCAGCGCAGGGCGGGUGGAGUCCUC |
| | | GUAGCGAGCCACCUUCAAUCAUUUUUGGAAGUCUCGUACCGG |
| | | GUGCUGAGACAUCUUGCGCAGCCG |
| | | UGAUAAUAGGCUGCCUUCUGCGGGGCUUGCCUUCUGGCCAUG |
| | | CCCUUCUUCUCUCCCUUGCACCUGUACCUCUACACUACUGGU |
| | | CUUUGAAUAAAGCCUGAGUAGGAAG |
| 4995 | DNA | TAATACGACTCACTATA |
| | sequence | GGGAAATAAGAGAGAAAAGAAGAGTAAGAAGAAATATAAGAG |
| | having the | CCACCATGGCCGGTCCCGCGACCCAAAGCCCCATGAAACTTAT |
| | T7 | GGCCCTGCAGTTGCTGCTTTGGCACTCGGCCCTCTGGACAGTCC |
| | polymerase | AAGAAGCGACTCCTCTCGGACCTGCCTCATCGTTGCCGCAGTCA |
| | site and | TTCCTTTTGAAGTGTCTGGAGCAGGTGCGAAAGATTCAGGGCG |
| | restriction | ATGGAGCCGCACTCCAAGAGAAGCTCTGCGCGACATACAAACT |
| | sites: | TTGCCATCCCGAGGAGCTCGTACTGCTCGGGCACAGCTTGGGG |
| | G-CSF miR- | ATTCCCTGGGCTCCTCTCTCGTCCTGTCCGTCGCAGGCTTTGCA |
| | 142-3p- | GTTGGCAGGGTGCCTTTCCCAGCTCCACTCCGGTTTGTTCTTGT |
| | seedless | ATCAGGGACTGCTGCAAGCCCTTGAGGGAATCTCGCCAGAATT |
| | | GGGCCCGACGCTGGACACGTTGCAGCTCGACGTGGCGGATTTC |
| | | GCAACAACCATCTGGCAGCAGATGGAGGAACTGGGGATGGCAC |
| | | CCGCGCTGCAGCCCACGCAGGGGGCAATGCCGGCCTTTGCGTC |
| | | CGCGTTTCAGCGCAGGGCGGGTGGAGTCCTCGTAGCGAGCCAC |
| | | CTTCAATCATTTTTGGAAGTCTCGTACCGGGTGCTGAGACATCT |
| | | TGCGCAGCCGTGATAATAGGCTGCCTTCTGCGGGGCTTGCCTTC |
| | | TGGCCATGCCCTTCTTCTCTCCCTTGCACCTGTACCTCTTCCATA |
| | | AAGTAGGAAATGGTCTTTGAATAAAGCCTGAGTAGGAAGGCG |
| | | GCCGCTCGAGCATGCATCTAGA |
| 4996 | mRNA | GGGAAAUAAGAGAGAAAAGAAGAGUAAGAAGAAAUAUAAGA |
| | sequence: | GCCACCAUGGCCGGUCCCGCGACCCAAAGCCCCAUGAAACUU |
| | G-CSF miR- | AUGGCCCUGCAGUUGCUGCUUUGGCACUCGGCCCUCUGGACA |
| | 142-3p- | GUCCAAGAAGCGACUCCUCUCGGACCUGCCUCAUCGUUGCCG |
| | seedless | CAGUCAUUCCUUUUGAAGUGUCUGGAGCAGGUGCGAAAGAUU |
| | | CAGGGCGAUGGAGCCGCACUCCAAGAGAAGCUCUGCGCGACA |
| | | UACAAACUUUGCCAUCCCGAGGAGCUCGUACUGCUCGGGCAC |
| | | AGCUUGGGGAUUCCCUGGGCUCCUCUCUCGUCCUGUCCGUCG |
| | | CAGGCUUUGCAGUUGGCAGGGUGCCUUUCCCAGCUCCACUCC |
| | | GGUUUGUUCUUGUAUCAGGGACUGCUGCAAGCCCUUGAGGGA |
| | | AUCUCGCCAGAAUUGGGCCCGACGCUGGACACGUUGCAGCUC |
| | | GACGUGGCGGAUUUCGCAACAACCAUCUGGCAGCAGAUGGAG |
| | | GAACUGGGGAUGGCACCCGCGCUGCAGCCCACGCAGGGGGCA |
| | | AUGCCGGCCUUUGCGUCCGCGUUUCAGCGCAGGGCGGGUGGA |
| | | GUCCUCGUAGCGAGCCACCUUCAAUCAUUUUUGGAAGUCUCG |
| | | UACCGGGUGCUGAGACAUCUUGCGCAGCCGUGAUAAUAGGCU |
| | | GCCUUCUGCGGGGCUUGCCUUCUGGCCAUGCCCUUCUUCUCU |
| | | CCCUUGCACCUGUACCUCUUCCAUAAAGUAGGAAAUGGUCUU |
| | | UGAAUAAAGCCUGAGUAGGAAG |
| 4997 | DNA | TAATACGACTCACTATA |
| | sequence | GGGAAATAAGAGAGAAAAGAAGAGTAAGAAGAAATATAAGAG |
| | having the | CCACCATGGCCGGTCCCGCGACCCAAAGCCCCATGAAACTTAT |
| | T7 | GGCCCTGCAGTTGCTGCTTTGGCACTCGGCCCTCTGGACAGTCC |
| | polymerase | AAGAAGCGACTCCTCTCGGACCTGCCTCATCGTTGCCGCAGTCA |
| | site and | TTCCTTTTGAAGTGTCTGGAGCAGGTGCGAAAGATTCAGGGCG |
| | restriction | ATGGAGCCGCACTCCAAGAGAAGCTCTGCGCGACATACAAACT |
| | sites: | TTGCCATCCCGAGGAGCTCGTACTGCTCGGGCACAGCTTGGGG |
| | G-CSF miR- | ATTCCCTGGGCTCCTCTCTCGTCCTGTCCGTCGCAGGCTTTGCA |
| | 146a | GTTGGCAGGGTGCCTTTCCCAGCTCCACTCCGGTTTGTTCTTGT |
| | | ATCAGGGACTGCTGCAAGCCCTTGAGGGAATCTCGCCAGAATT |
| | | GGGCCCGACGCTGGACACGTTGCAGCTCGACGTGGCGGATTTC |
| | | GCAACAACCATCTGGCAGCAGATGGAGGAACTGGGGATGGCAC |
| | | CCGCGCTGCAGCCCACGCAGGGGGCAATGCCGGCCTTTGCGTC |
| | | CGCGTTTCAGCGCAGGGCGGGTGGAGTCCTCGTAGCGAGCCAC |
| | | CTTCAATCATTTTTGGAAGTCTCGTACCGGGTGCTGAGACATCT |
| | | TGCGCAGCCGTGATAATAGGCTGCCTTCTGCGGGGCTTGCCTTC |
| | | TGGCCATGCCCTTCTTCTCTCCCTTGCACCTGTACCTCTAACCCA |
| | | TGGAATTCAGTTCTCATGGTCTTTGAATAAAGCCTGAGTAGGAA |
| | | GGCGGCCGCTCGAGCATGCATCTAGA |
| 4998 | mRNA | GGGAAAUAAGAGAGAAAAGAAGAGUAAGAAGAAAUAUAAGA |
| | sequence: | GCCACCAUGGCCGGUCCCGCGACCCAAAGCCCCAUGAAACUU |
| | G-CSF miR- | AUGGCCCUGCAGUUGCUGCUUUGGCACUCGGCCCUCUGGACA |
| | 146a | GUCCAAGAAGCGACUCCUCUCGGACCUGCCUCAUCGUUGCCG |
| | | CAGUCAUUCCUUUUGAAGUGUCUGGAGCAGGUGCGAAAGAUU |
| | | CAGGGCGAUGGAGCCGCACUCCAAGAGAAGCUCUGCGCGACA |
| | | UACAAACUUUGCCAUCCCGAGGAGCUCGUACUGCUCGGGCAC |
| | | AGCUUGGGGAUUCCCUGGGCUCCUCUCUCGUCCUGUCCGUCG |
| | | CAGGCUUUGCAGUUGGCAGGGUGCCUUUCCCAGCUCCACUCC |
| | | GGUUUGUUCUUGUAUCAGGGACUGCUGCAAGCCCUUGAGGGA |
| | | AUCUCGCCAGAAUUGGGCCCGACGCUGGACACGUUGCAGCUC |
| | | GACGUGGCGGAUUUCGCAACAACCAUCUGGCAGCAGAUGGAG |
| | | GAACUGGGGAUGGCACCCGCGCUGCAGCCCACGCAGGGGGCA |
| | | AUGCCGGCCUUUGCGUCCGCGUUUCAGCGCAGGGCGGGUGGA |
| | | GUCCUCGUAGCGAGCCACCUUCAAUCAUUUUUGGAAGUCUCG |
| | | UACCGGGUGCUGAGACAUCUUGCGCAGCCGUGAUAAUAGGCU |
| | | GCCUUCUGCGGGGCUUGCCUUCUGGCCAUGCCCUUCUUCUCU |
| | | CCCUUGCACCUGUACCUCUAACCCAUGGAAUUCAGUUCUCAU |
| | | GGUCUUUGAAUAAAGCCUGAGUAGGAAG |
| 4999 | DNA | TAATACGACTCACTATA |
| | sequence | GGGAAATAAGAGAGAAAAGAAGAGTAAGAAGAAATATAAGAG |
| | having the | CCACCATGGCCGGTCCCGCGACCCAAAGCCCCATGAAACTTAT |
| | T7 | GGCCCTGCAGTTGCTGCTTTGGCACTCGGCCCTCTGGACAGTCC |
| | polymerase | AAGAAGCGACTCCTCTCGGACCTGCCTCATCGTTGCCGCAGTCA |
| | site and | TTCCTTTTGAAGTGTCTGGAGCAGGTGCGAAAGATTCAGGGCG |
| | restriction | ATGGAGCCGCACTCCAAGAGAAGCTCTGCGCGACATACAAACT |
| | sites: | TTGCCATCCCGAGGAGCTCGTACTGCTCGGGCACAGCTTGGGG |
| | G-CSF- | ATTCCCTGGGCTCCTCTCTCGTCCTGTCCGTCGCAGGCTTTGCA |
| | 146a-seed | GTTGGCAGGGTGCCTTTCCCAGCTCCACTCCGGTTTGTTCTTGT |
| | | ATCAGGGACTGCTGCAAGCCCTTGAGGGAATCTCGCCAGAATT |
| | | GGGCCCGACGCTGGACACGTTGCAGCTCGACGTGGCGGATTTC |
| | | GCAACAACCATCTGGCAGCAGATGGAGGAACTGGGGATGGCAC |
| | | CCGCGCTGCAGCCCACGCAGGGGGCAATGCCGGCCTTTGCGTC |
| | | CGCGTTTCAGCGCAGGGCGGGTGGAGTCCTCGTAGCGAGCCAC |
| | | CTTCAATCATTTTTGGAAGTCTCGTACCGGGTGCTGAGACATCT |
| | | TGCGCAGCCGTGATAATAGGCTGCCTTCTGCGGGGCTTGCCTTC |
| | | TGGCCATGCCCTTCTTCTCTCCCTTGCACCTGTACCTCTAGTTCT |
| | | CTGGTCTTTGAATAAAGCCTGAGTAGGAAGGCGGCCGCTCGA |
| | | GCATGCATCTAGA |
| 5000 | mRNA | GGGAAAUAAGAGAGAAAAGAAGAGUAAGAAGAAAUAUAAGA |
| | sequence: | GCCACCAUGGCCGGUCCCGCGACCCAAAGCCCCAUGAAACUU |
| | G-CSF- | AUGGCCCUGCAGUUGCUGCUUUGGCACUCGGCCCUCUGGACA |
| | 146a-seed | GUCCAAGAAGCGACUCCUCUCGGACCUGCCUCAUCGUUGCCG |
| | | CAGUCAUUCCUUUUGAAGUGUCUGGAGCAGGUGCGAAAGAUU |
| | | CAGGGCGAUGGAGCCGCACUCCAAGAGAAGCUCUGCGCGACA |
| | | UACAAACUUUGCCAUCCCGAGGAGCUCGUACUGCUCGGGCAC |
| | | AGCUUGGGGAUUCCCUGGGCUCCUCUCUCGUCCUGUCCGUCG |
| | | CAGGCUUUGCAGUUGGCAGGGUGCCUUUCCCAGCUCCACUCC |
| | | GGUUUGUUCUUGUAUCAGGGACUGCUGCAAGCCCUUGAGGGA |
| | | AUCUCGCCAGAAUUGGGCCCGACGCUGGACACGUUGCAGCUC |
| | | GACGUGGCGGAUUUCGCAACAACCAUCUGGCAGCAGAUGGAG |
| | | GAACUGGGGAUGGCACCCGCGCUGCAGCCCACGCAGGGGGCA |
| | | AUGCCGGCCUUUGCGUCCGCGUUUCAGCGCAGGGCGGGUGGA |
| | | GUCCUCGUAGCGAGCCACCUUCAAUCAUUUUUGGAAGUCUCG |
| | | UACCGGGUGCUGAGACAUCUUGCGCAGCCGUGAUAAUAGGCU |
| | | GCCUUCUGCGGGGCUUGCCUUCUGGCCAUGCCCUUCUUCUCU |
| | | CCCUUGCACCUGUACCUCUAGUUCUCUGGUCUUUGAAUAAAG |
| | | CCUGAGUAGGAAG |
| 5001 | DNA | TAATACGACTCACTATA |
| | sequence | GGGAAATAAGAGAGAAAAGAAGAGTAAGAAGAAATATAAGAG |
| | having the | CCACCATGGCCGGTCCCGCGACCCAAAGCCCCATGAAACTTAT |
| | T7 | GGCCCTGCAGTTGCTGCTTTGGCACTCGGCCCTCTGGACAGTCC |
| | polymerase | AAGAAGCGACTCCTCTCGGACCTGCCTCATCGTTGCCGCAGTCA |
| | site and | TTCCTTTTGAAGTGTCTGGAGCAGGTGCGAAAGATTCAGGGCG |
| | restriction | ATGGAGCCGCACTCCAAGAGAAGCTCTGCGCGACATACAAACT |
| | sites: | TTGCCATCCCGAGGAGCTCGTACTGCTCGGGCACAGCTTGGGG |
| | G-CSF- | ATTCCCTGGGCTCCTCTCTCGTCCTGTCCGTCGCAGGCTTTGCA |
| | 146a- | GTTGGCAGGGTGCCTTTCCCAGCTCCACTCCGGTTTGTTCTTGT |
| | seedless | ATCAGGGACTGCTGCAAGCCCTTGAGGGAATCTCGCCAGAATT |
| | | GGGCCCGACGCTGGACACGTTGCAGCTCGACGTGGCGGATTTC |
| | | GCAACAACCATCTGGCAGCAGATGGAGGAACTGGGGATGGCAC |
| | | CCGCGCTGCAGCCCACGCAGGGGGCAATGCCGGCCTTTGCGTC |
| | | CGCGTTTCAGCGCAGGGCGGGTGGAGTCCTCGTAGCGAGCCAC |
| | | CTTCAATCATTTTTGGAAGTCTCGTACCGGGTGCTGAGACATCT |
| | | TGCGCAGCCGTGATAATAGGCTGCCTTCTGCGGGGCTTGCCTTC |
| | | TGGCCATGCCCTTCTTCTCTCCCTTGCACCTGTACCTCTAACCCA |
| | | TGGAATTCATGGTCTTTGAATAAAGCCTGAGTAGGAAGGCGGC |
| | | CGCTCGAGCATGCATCTAGA |
| 5002 | mRNA | GGGAAAUAAGAGAGAAAAGAAGAGUAAGAAGAAAUAUAAGA |
| | sequence: | GCCACCAUGGCCGGUCCCGCGACCCAAAGCCCCAUGAAACUU |
| | G-CSF- | AUGGCCCUGCAGUUGCUGCUUUGGCACUCGGCCCUCUGGACA |
| | 146a- | GUCCAAGAAGCGACUCCUCUCGGACCUGCCUCAUCGUUGCCG |
| | seedless | CAGUCAUUCCUUUUGAAGUGUCUGGAGCAGGUGCGAAAGAUU |
| | | CAGGGCGAUGGAGCCGCACUCCAAGAGAAGCUCUGCGCGACA |
| | | UACAAACUUUGCCAUCCCGAGGAGCUCGUACUGCUCGGGCAC |
| | | AGCUUGGGGAUUCCCUGGGCUCCUCUCUCGUCCUGUCCGUCG |
| | | CAGGCUUUGCAGUUGGCAGGGUGCCUUUCCCAGCUCCACUCC |
| | | GGUUUGUUCUUGUAUCAGGGACUGCUGCAAGCCCUUGAGGGA |
| | | AUCUCGCCAGAAUUGGGCCCGACGCUGGACACGUUGCAGCUC |
| | | GACGUGGCGGAUUUCGCAACAACCAUCUGGCAGCAGAUGGAG |
| | | GAACUGGGGAUGGCACCCGCGCUGCAGCCCACGCAGGGGGCA |
| | | AUGCCGGCCUUUGCGUCCGCGUUUCAGCGCAGGGCGGGUGGA |
| | | GUCCUCGUAGCGAGCCACCUUCAAUCAUUUUUGGAAGUCUCG |
| | | UACCGGGUGCUGAGACAUCUUGCGCAGCCGUGAUAAUAGGCU |
| | | GCCUUCUGCGGGGCUUGCCUUCUGGCCAUGCCCUUCUUCUCU |
| | | CCCUUGCACCUGUACCUCUAACCCAUGGAAUUCAUGGUCUUU |
| | | GAAUAAAGCCUGAGUAGGAAG |

[1007] It is like that the binding site “seed” sequence is sufficient to induce microRNA binding, the expression of G-CSF should be down-regulated in cells transfected with miR-142-3p, miR-142-3p-seed, miR-142-5p, miR-142-5p-seed, miR-146a or miR-146a-seed. Whereas, the miR-142-3p-seedless, miR-142-5p-seedless, miR-146a-seedless should not change the expression of G-CSF, as compared with cells transfected with G-CSF mRNA without microRNA binding sites.

### Example 25. APCs Specific microRNA Binding Sites to Suppress Modified Nucleic Acid Mediated Immune Stimulation

[1008] The binding sites for microRNAs are used in the 3′UTR of mRNA therapeutics to selectively degrade mRNA therapeutics in the immune cells to subdue unwanted immunogenic reactions caused by mRNA therapeutics delivery.

[1009] A polynucleotide comprising a series of 3′UTR miR binding sites which make the nucleic acids or mRNA of the present invention more unstable in antigen presenting cells (APCs), such as, but not limited to mir-142-5p, mir-142-3p, mir-146a-5p and mir-146a-3p, encodes an oncology-related polypeptide of the present invention. The addition of miR binding sites in the 3′UTR making a signal sensor polynucleotide unstable would subdue modified mRNA mediated immune stimulation.

[1010] Experiments comparing the cytokine expression (e.g. TNF-alpha) induced by the polypeptide with APCs specific microRNA signature vs. without such signature is performed in vitro by methods described herein and/or known in the art.

### Example 26. In Vitro Expression of mRNAs with miR Binding Sites

[1011] Human embryonic kidney epithelial cells (HEK293A), antigen-presenting cells or cell lines with highly expressed mir-142/146, such as monocyte-derived dendritic cells (MDDC) or PBMC, are seeded at a density of 200,000 per well in 500 ul cell culture medium (InVitro GRO medium from Celsis, Chicago, IL). Cultured cells are transfected with G-CSF mRNAs with or without microRNA signature, as described in Example 24. The cells are transfected for five consecutive days. The transfection complexes are removed four hours after each round of transfection.

[1012] The culture supernatant is assayed for secreted G-CSF (R&D Systems, catalog #DCS50), tumor necrosis factor-alpha (TNF-alpha) and interferon alpha (IFN-alpha by ELISA every day after transfection following manufacturer's protocols. The cells are analyzed for viability using CELL TITER GLO® (Promega, catalog #G7570) 6 hrs and 18 hrs after the first round of transfection and every alternate day following that. At the same time from the harvested cells, total RNA is isolated and treated with DNASE® using the RNAEASY micro kit (catalog #74004) following the manufacturer's protocol. 100 ng of total RNA is used for cDNA synthesis using the High Capacity cDNA Reverse Transcription kit (Applied Biosystems, cat #4368814) following the manufacturer's protocol. The cDNA is then analyzed for the expression of innate immune response genes by quantitative real time PCR using SybrGreen in a Biorad CFX 384 instrument following the manufacturer's protocol.

### Example 27. In Vivo Detection of Innate Immune Response Study

[1013] To test the nucleic acids or mRNA protein expression and in vivo immune response, female BALB/C mice (n=5) are injected intramuscularly with G-CSF mRNA with or without microRNA signatures as described in Example 24. Blood is collected at 8 hours after dosing. The protein levels of G-CSF, TNF-alpha and IFN-alpha is determined by ELISA.

[1014] The difference of cytokine production is seen as measured by mouse TNF-alpha and IFN-alpha level in serum. Injection with G-CSF modified mRNA having miR-142 and miR-146a binding site or binding site seed shows a lower level of cytokine response in vivo.

### Example 28. Expression of miR-122 in Primary Hepatocytes

[1015] Hepatocyte specific miR-122 level in rat and human primary hepatocytes was measured. Hela Cells and primary rat and human hepatocytes were cultured and RNAs were extracted from cell lysates. The miR-122 level in rat and human primary hepatocytes was compared with that in Hela cells. The miR-122 level is about 6 fold increased in primary human hepatocytes and about 12 fold increased in primary rat hepatocytes, respectively, as compared with that in Hela cells.

### Example 29. Expression of Modified Nucleic Acid with Mir-122 Binding Site in Hepatocytes

[1016] Primary rat and human hepatocytes and Hela cells were seeded at a density of 200,000 per well in 500 ul cell culture medium (InVitro GRO medium from Celsis, Chicago, IL). G-CSF mRNA having a miR-122 binding site in the 3′UTR (G-CSF miR-122-1X) (mRNA sequence is shown in SEQ ID NO: 4268; polyA tail of approximately 140 nucleotides not shown in sequence; 5′Cap, Cap1) fully modified with 5-methylcytidine and pseudouridine (5 mC/pU), or fully modified with pseudouridine(pU) or G-CSF mRNA with four miR-122 binding sites with the seed deleted (G-CSF no seed) (mRNA sequence is shown in SEQ ID NO: 4270; polyA tail of approximately 140 nucleotides not shown in sequence; 5′Cap, Cap1) fully modified with 5-methylcytidine and pseudouridine (5 mC/pU) or fully modified with pseudouridine (pU) was tested at a concentration of 250 ng per well in 24 well plates. The 24 hours after transfection, the expression of G-CSF was measured by ELISA, and the results are shown in Table 28.

TABLE 28
G-CSF mir122 expression

| | | Primary human | Primary rat |
|---|---|---|---|
| | Hela cells | Hepatocytes | Hepatocytes |
| | Protein | Protein | Protein |
| | Expression | Expression | Expression |
| | (ng/mL) | (ng/mL) | (ng/mL) |
| G-CSF miR-122 | 167.34 | 67.60 | 3.40 |
| 1X (5 mC/pU) | | | |
| G-CSF miR-122 | 292.18 | 116.18 | 25.63 |
| 1X (pU) | | | |
| G-CSF no seed | 194.78 | 129.77 | 8.39 |
| (5 mC/pU) | | | |
| G-CSF no seed | 335.78 | 462.88 | 84.93 |
| (pU) | | | |

### Example 30. Expression of Modified Nucleic Acids with Mir-122 Binding Sites in Hepatocytes

[1017] MicroRNA control gene expression through the translational suppression and/or degradation of target messenger RNA. Mir-122 binding site containing G-CSF mRNA was translationally regulated in hepatocytes.

[1018] Primary rat and human hepatocytes and Hela cells were seeded at a density of 200,000 per well in 500 ul cell culture medium (InVitro GRO medium from Celsis, Chicago, IL). G-CSF mRNA (G-CSF alpha) (mRNA sequence is shown in SEQ ID NO: 4266; polyA tail of approximately 140 nucleotides not shown in sequence; 5′Cap, Cap1) fully modified with 5-methylcytidine and pseudouridine (5 mC/pU), G-CSF mRNA having a miR-122 binding site in the 3′UTR (G-CSF miR-122-1X) (mRNA sequence is shown in SEQ ID NO: 4268; polyA tail of approximately 140 nucleotides not shown in sequence; 5′Cap, Cap 1) fully modified with 5-methylcytidine and pseudouridine (5 mc/pU) or G-CSF mRNA with four miR-122 binding sites with the seed deleted (G-CSF no seed) (mRNA sequence is shown in SEQ ID NO: 4270; polyA tail of approximately 140 nucleotides not shown in sequence; 5′Cap, Cap1I) fully modified with 5-methylcytidine and pseudouridine (5 mC/pU) was tested at a concentration of 250 ng per well in 24 well plates. 24 hours after transfection, the expression of G-CSF was measured by ELISA. The G-CSF drug (mRNA) levels and protein levels are shown in Table 29.

TABLE 29
G-CSF drug and protein levels

| | Human Hepatocytes | | | |
|---|---|---|---|---|
| | Drug | | Rat Hepatocytes | |
| | (mRNA) | | Drug (mRNA) | |
| | level | | level | |
| | (unit | Protein | (unit | Protein |
| | normalized | expression | normalized to | expression |
| | to HPRT) | (ng/ml) | HPRT) | (ng/ml) |
| G-CSF alpha | 43237.6 | 247.26 | 26615.88 | 784.6 |
| (5 mC/pU) | | | | |
| G-CSF miR- | 46340.9 | 74.07 | 20171.07 | 40.628 |
| 122-1X | | | | |
| (5 mC/pU) | | | | |
| G-CSF no seed | 70239.7 | 298.28 | 23170.47 | 894.06 |
| (5 mC/pU) | | | | |

### Example 31. Modified mRNA Sequences with or without Kozak and/or IRES Sequences

[1019] Modified mRNA encoding G-CSF with or without a Kozak and/or IRES sequence, and their corresponding cDNA sequences, are shown below in Table 30. In Table 30, the start codon of each sequence is underlined.

TABLE 30
G-CSF Sequences

| | | SEQ |
|---|---|---|
| | | ID |
| | Sequence | NO: |
| G-CSF | Optimized G-CSF cDNA sequence containing a T7 polymerase site, | 5003 |
| with | kozak sequence, IRES and Xba1 restriction site: | |
| Kozak | TAATACGACTCACTATA | |
| sequence | GGGAAATAAGAGAGAAAAGAAGAGTAAGAAGAAATATAAG | |
| and IRES | AGCCACC | |
| and | TCGTGAGGATCTATTTCCGGTGAATTCCTCGAGACTAGTTCT | |
| human | AGAGCGGCCGCGGATCCCGCCCCTCTCCCTCCCCCCCCCCTA | |
| alpha- | ACGTTACTGGCCGAAGCCGCTTGGAATAAGGCCGGTGTGCG | |
| globin | TTTGTCTATATGTTATTTTCCACCATATTGCCGTCTTTTGGCA | |
| 3′UTR | ATGTGAGGGCCCGGAAACCTGGCCCTGTCTTCTTGACGAGC | |
| | ATTCCTAGGGGTCTTTCCCCTCTCGCCAAAGGAATGCAAGGT | |
| | CTGTTGAATGTCGTGAAGGAAGCAGTTCCTCTGGAAGCTTCT | |
| | TGAAGACAAACAACGTCTGTAGCGACCCTTTGCAGGCAGCG | |
| | GAACCCCCCACCTGGCGACAGGTGCCTCTGCGGCCAAAAGC | |
| | CACGTGTATAAGATACACCTGCAAAGGCGGCACAACCCCAG | |
| | TGCCACGTTGTGAGTTGGATAGTTGTGGAAAGAGTCAAATG | |
| | GCTCACCTCAAGCGTATTCAACAAGGGGCTGAAGGATGCCC | |
| | AGAAGGTACCCCATTGTATGGGATCTGATCTGGGGCCTCGG | |
| | TGCACATGCTTTACATGTGTTTAGTCGAGGTTAAAAAACGTC | |
| | TAGGCCCCCCGAACCACGGGGACGTGGTTTTCCTTTGAAAA | |
| | ACACGATGATAAT | |
| | ATGGCCGGTCCCGCGACCCAAAGCCCCATGAAACTTATGGC | |
| | CCTGCAGTTGCTGCTTTGGCACTCGGCCCTCTGGACAGTCCA | |
| | AGAAGCGACTCCTCTCGGACCTGCCTCATCGTTGCCGCAGTC | |
| | ATTCCTTTTGAAGTGTCTGGAGCAGGTGCGAAAGATTCAGG | |
| | GCGATGGAGCCGCACTCCAAGAGAAGCTCTGCGCGACATAC | |
| | AAACTTTGCCATCCCGAGGAGCTCGTACTGCTCGGGCACAG | |
| | CTTGGGGATTCCCTGGGCTCCTCTCTCGTCCTGTCCGTCGCA | |
| | GGCTTTGCAGTTGGCAGGGTGCCTTTCCCAGCTCCACTCCGG | |
| | TTTGTTCTTGTATCAGGGACTGCTGCAAGCCCTTGAGGGAAT | |
| | CTCGCCAGAATTGGGCCCGACGCTGGACACGTTGCAGCTCG | |
| | ACGTGGCGGATTTCGCAACAACCATCTGGCAGCAGATGGAG | |
| | GAACTGGGGATGGCACCCGCGCTGCAGCCCACGCAGGGGG | |
| | CAATGCCGGCCTTTGCGTCCGCGTTTCAGCGCAGGGCGGGT | |
| | GGAGTCCTCGTAGCGAGCCACCTTCAATCATTTTTGGAAGTC | |
| | TCGTACCGGGTGCTGAGACATCTTGCGCAGCCG | |
| | TGATAATAG | |
| | GCTGGAGCCTCGGTGGCCATGCTTCTTGCCCCTTGGGCCTCC | |
| | CCCCAGCCCCTCCTCCCCTTCCTGCACCCGTACCCCCGTGGT | |
| | CTTTGAATAAAGTCTGAGTGGGCGGCTCTAGA | |
| | mRNA sequence (transcribed): | 5004 |
| | GGGAAAUAAGAGAGAAAAGAAGAGUAAGAAGAAAUAUAA | |
| | GAGCCACC | |
| | UCGUGAGGAUCUAUUUCCGGUGAAUUCCUCGAGACUAGUU | |
| | CUAGAGCGGCCGCGGAUCCCGCCCCUCUCCCUCCCCCCCCC | |
| | CUAACGUUACUGGCCGAAGCCGCUUGGAAUAAGGCCGGUG | |
| | UGCGUUUGUCUAUAUGUUAUUUUCCACCAUAUUGCCGUCU | |
| | UUUGGCAAUGUGAGGGCCCGGAAACCUGGCCCUGUCUUCU | |
| | UGACGAGCAUUCCUAGGGGUCUUUCCCCUCUCGCCAAAGG | |
| | AAUGCAAGGUCUGUUGAAUGUCGUGAAGGAAGCAGUUCC | |
| | UCUGGAAGCUUCUUGAAGACAAACAACGUCUGUAGCGACC | |
| | CUUUGCAGGCAGCGGAACCCCCCACCUGGCGACAGGUGCC | |
| | UCUGCGGCCAAAAGCCACGUGUAUAAGAUACACCUGCAAA | |
| | GGCGGCACAACCCCAGUGCCACGUUGUGAGUUGGAUAGUU | |
| | GUGGAAAGAGUCAAAUGGCUCACCUCAAGCGUAUUCAACA | |
| | AGGGGCUGAAGGAUGCCCAGAAGGUACCCCAUUGUAUGGG | |
| | AUCUGAUCUGGGGCCUCGGUGCACAUGCUUUACAUGUGUU | |
| | UAGUCGAGGUUAAAAAACGUCUAGGCCCCCCGAACCACGG | |
| | GGACGUGGUUUUCCUUUGAAAAACACGAUGAUAAU | |
| | AUGGCCGGUCCCGCGACCCAAAGCCCCAUGAAACUUAUGG | |
| | CCCUGCAGUUGCUGCUUUGGCACUCGGCCCUCUGGACAGU | |
| | CCAAGAAGCGACUCCUCUCGGACCUGCCUCAUCGUUGCCG | |
| | CAGUCAUUCCUUUUGAAGUGUCUGGAGCAGGUGCGAAAG | |
| | AUUCAGGGCGAUGGAGCCGCACUCCAAGAGAAGCUCUGCG | |
| | CGACAUACAAACUUUGCCAUCCCGAGGAGCUCGUACUGCU | |
| | CGGGCACAGCUUGGGGAUUCCCUGGGCUCCUCUCUCGUCC | |
| | UGUCCGUCGCAGGCUUUGCAGUUGGCAGGGUGCCUUUCCC | |
| | AGCUCCACUCCGGUUUGUUCUUGUAUCAGGGACUGCUGCA | |
| | AGCCCUUGAGGGAAUCUCGCCAGAAUUGGGCCCGACGCUG | |
| | GACACGUUGCAGCUCGACGUGGCGGAUUUCGCAACAACCA | |
| | UCUGGCAGCAGAUGGAGGAACUGGGGAUGGCACCCGCGCU | |
| | GCAGCCCACGCAGGGGGCAAUGCCGGCCUUUGCGUCCGCG | |
| | UUUCAGCGCAGGGCGGGUGGAGUCCUCGUAGCGAGCCACC | |
| | UUCAAUCAUUUUUGGAAGUCUCGUACCGGGUGCUGAGACA | |
| | UCUUGCGCAGCCG | |
| | UGAUAAUAG | |
| | GCUGGAGCCUCGGUGGCCAUGCUUCUUGCCCCUUGGGCCU | |
| | CCCCCCAGCCCCUCCUCCCCUUCCUGCACCCGUACCCCCGU | |
| | GGUCUUUGAAUAAAGUCUGAGUGGGCGGC | |
| G-CSF | Optimized G-CSF cDNA sequence containing a T7 polymerase site, | 5005 |
| without a | IRES and Xba1 restriction site: | |
| Kozak | TAATACGACTCACTATA | |
| sequence | GGGAAATAAGAGAGAAAAGAAGAGTAAGAAGAAATATAAGA | |
| and with | TCGTGAGGATCTATTTCCGGTGAATTCCTCGAGACTAGTTCT | |
| an IRES | AGAGCGGCCGCGGATCCCGCCCCTCTCCCTCCCCCCCCCCTA | |
| and | ACGTTACTGGCCGAAGCCGCTTGGAATAAGGCCGGTGTGCG | |
| human | TTTGTCTATATGTTATTTTCCACCATATTGCCGTCTTTTGGCA | |
| alpha- | ATGTGAGGGCCCGGAAACCTGGCCCTGTCTTCTTGACGAGC | |
| globin | ATTCCTAGGGGTCTTTCCCCTCTCGCCAAAGGAATGCAAGGT | |
| 3′UTR | CTGTTGAATGTCGTGAAGGAAGCAGTTCCTCTGGAAGCTTCT | |
| | TGAAGACAAACAACGTCTGTAGCGACCCTTTGCAGGCAGCG | |
| | GAACCCCCCACCTGGCGACAGGTGCCTCTGCGGCCAAAAGC | |
| | CACGTGTATAAGATACACCTGCAAAGGCGGCACAACCCCAG | |
| | TGCCACGTTGTGAGTTGGATAGTTGTGGAAAGAGTCAAATG | |
| | GCTCACCTCAAGCGTATTCAACAAGGGGCTGAAGGATGCCC | |
| | AGAAGGTACCCCATTGTATGGGATCTGATCTGGGGCCTCGG | |
| | TGCACATGCTTTACATGTGTTTAGTCGAGGTTAAAAAACGTC | |
| | TAGGCCCCCCGAACCACGGGGACGTGGTTTTCCTTTGAAAA | |
| | ACACGATGATAAT | |
| | ATGGCCGGTCCCGCGACCCAAAGCCCCATGAAACTTATGGC | |
| | CCTGCAGTTGCTGCTTTGGCACTCGGCCCTCTGGACAGTCCA | |
| | AGAAGCGACTCCTCTCGGACCTGCCTCATCGTTGCCGCAGTC | |
| | ATTCCTTTTGAAGTGTCTGGAGCAGGTGCGAAAGATTCAGG | |
| | GCGATGGAGCCGCACTCCAAGAGAAGCTCTGCGCGACATAC | |
| | AAACTTTGCCATCCCGAGGAGCTCGTACTGCTCGGGCACAG | |
| | CTTGGGGATTCCCTGGGCTCCTCTCTCGTCCTGTCCGTCGCA | |
| | GGCTTTGCAGTTGGCAGGGTGCCTTTCCCAGCTCCACTCCGG | |
| | TTTGTTCTTGTATCAGGGACTGCTGCAAGCCCTTGAGGGAAT | |
| | CTCGCCAGAATTGGGCCCGACGCTGGACACGTTGCAGCTCG | |
| | ACGTGGCGGATTTCGCAACAACCATCTGGCAGCAGATGGAG | |
| | GAACTGGGGATGGCACCCGCGCTGCAGCCCACGCAGGGGG | |
| | CAATGCCGGCCTTTGCGTCCGCGTTTCAGCGCAGGGCGGGT | |
| | GGAGTCCTCGTAGCGAGCCACCTTCAATCATTTTTGGAAGTC | |
| | TCGTACCGGGTGCTGAGACATCTTGCGCAGCCG | |
| | TGATAATAG | |
| | GCTGGAGCCTCGGTGGCCATGCTTCTTGCCCCTTGGGCCTCC | |
| | CCCCAGCCCCTCCTCCCCTTCCTGCACCCGTACCCCCGTGGT | |
| | CTTTGAATAAAGTCTGAGTGGGCGGCTCTAGA | |
| | mRNA sequence (transcribed): | 5006 |
| | GGGAAAUAAGAGAGAAAAGAAGAGUAAGAAGAAAUAUAA | |
| | GA | |
| | UCGUGAGGAUCUAUUUCCGGUGAAUUCCUCGAGACUAGUU | |
| | CUAGAGCGGCCGCGGAUCCCGCCCCUCUCCCUCCCCCCCCC | |
| | CUAACGUUACUGGCCGAAGCCGCUUGGAAUAAGGCCGGUG | |
| | UGCGUUUGUCUAUAUGUUAUUUUCCACCAUAUUGCCGUCU | |
| | UUUGGCAAUGUGAGGGCCCGGAAACCUGGCCCUGUCUUCU | |
| | UGACGAGCAUUCCUAGGGGUCUUUCCCCUCUCGCCAAAGG | |
| | AAUGCAAGGUCUGUUGAAUGUCGUGAAGGAAGCAGUUCC | |
| | UCUGGAAGCUUCUUGAAGACAAACAACGUCUGUAGCGACC | |
| | CUUUGCAGGCAGCGGAACCCCCCACCUGGCGACAGGUGCC | |
| | UCUGCGGCCAAAAGCCACGUGUAUAAGAUACACCUGCAAA | |
| | GGCGGCACAACCCCAGUGCCACGUUGUGAGUUGGAUAGUU | |
| | GUGGAAAGAGUCAAAUGGCUCACCUCAAGCGUAUUCAACA | |
| | AGGGGCUGAAGGAUGCCCAGAAGGUACCCCAUUGUAUGGG | |
| | AUCUGAUCUGGGGCCUCGGUGCACAUGCUUUACAUGUGUU | |
| | UAGUCGAGGUUAAAAAACGUCUAGGCCCCCCGAACCACGG | |
| | GGACGUGGUUUUCCUUUGAAAAACACGAUGAUAAU | |
| | AUGGCCGGUCCCGCGACCCAAAGCCCCAUGAAACUUAUGG | |
| | CCCUGCAGUUGCUGCUUUGGCACUCGGCCCUCUGGACAGU | |
| | CCAAGAAGCGACUCCUCUCGGACCUGCCUCAUCGUUGCCG | |
| | CAGUCAUUCCUUUUGAAGUGUCUGGAGCAGGUGCGAAAG | |
| | AUUCAGGGCGAUGGAGCCGCACUCCAAGAGAAGCUCUGCG | |
| | CGACAUACAAACUUUGCCAUCCCGAGGAGCUCGUACUGCU | |
| | CGGGCACAGCUUGGGGAUUCCCUGGGCUCCUCUCUCGUCC | |
| | UGUCCGUCGCAGGCUUUGCAGUUGGCAGGGUGCCUUUCCC | |
| | AGCUCCACUCCGGUUUGUUCUUGUAUCAGGGACUGCUGCA | |
| | AGCCCUUGAGGGAAUCUCGCCAGAAUUGGGCCCGACGCUG | |
| | GACACGUUGCAGCUCGACGUGGCGGAUUUCGCAACAACCA | |
| | UCUGGCAGCAGAUGGAGGAACUGGGGAUGGCACCCGCGCU | |
| | GCAGCCCACGCAGGGGGCAAUGCCGGCCUUUGCGUCCGCG | |
| | UUUCAGCGCAGGGCGGGUGGAGUCCUCGUAGCGAGCCACC | |
| | UUCAAUCAUUUUUGGAAGUCUCGUACCGGGUGCUGAGACA | |
| | UCUUGCGCAGCCG | |
| | UGAUAAUAG | |
| | GCUGGAGCCUCGGUGGCCAUGCUUCUUGCCCCUUGGGCCU | |
| | CCCCCCAGCCCCUCCUCCCCUUCCUGCACCCGUACCCCCGU | |
| | GGUCUUUGAAUAAAGUCUGAGUGGGCGGC | |
| G-CSF | Optimized G-CSF cDNA sequence containing a T7 polymerase site, a | 5007 |
| without a | Kozak sequence and Xba1 restriction site: | |
| Kozak | TAATACGACTCACTATA | |
| sequence | GGGAAATAAGAGAGAAAAGAAGAGTAAGAAGAAATATAAGA | |
| and with | ATGGCCGGTCCCGCGACCCAAAGCCCCATGAAACTTATGGC | |
| a human | CCTGCAGTTGCTGCTTTGGCACTCGGCCCTCTGGACAGTCCA | |
| alpha- | AGAAGCGACTCCTCTCGGACCTGCCTCATCGTTGCCGCAGTC | |
| globin | ATTCCTTTTGAAGTGTCTGGAGCAGGTGCGAAAGATTCAGG | |
| 3′UTR | GCGATGGAGCCGCACTCCAAGAGAAGCTCTGCGCGACATAC | |
| | AAACTTTGCCATCCCGAGGAGCTCGTACTGCTCGGGCACAG | |
| | CTTGGGGATTCCCTGGGCTCCTCTCTCGTCCTGTCCGTCGCA | |
| | GGCTTTGCAGTTGGCAGGGTGCCTTTCCCAGCTCCACTCCGG | |
| | TTTGTTCTTGTATCAGGGACTGCTGCAAGCCCTTGAGGGAAT | |
| | CTCGCCAGAATTGGGCCCGACGCTGGACACGTTGCAGCTCG | |
| | ACGTGGCGGATTTCGCAACAACCATCTGGCAGCAGATGGAG | |
| | GAACTGGGGATGGCACCCGCGCTGCAGCCCACGCAGGGGG | |
| | CAATGCCGGCCTTTGCGTCCGCGTTTCAGCGCAGGGCGGGT | |
| | GGAGTCCTCGTAGCGAGCCACCTTCAATCATTTTTGGAAGTC | |
| | TCGTACCGGGTGCTGAGACATCTTGCGCAGCCG | |
| | TGATAATAG | |
| | GCTGGAGCCTCGGTGGCCATGCTTCTTGCCCCTTGGGCCTCC | |
| | CCCCAGCCCCTCCTCCCCTTCCTGCACCCGTACCCCCGTGGT | |
| | CTTTGAATAAAGTCTGAGTGGGCGGCTCTAGA | |
| | mRNA sequence (transcribed): | 5008 |
| | GGGAAAUAAGAGAGAAAAGAAGAGUAAGAAGAAAUAUAA | |
| | GA | |
| | AUGGCCGGUCCCGCGACCCAAAGCCCCAUGAAACUUAUGG | |
| | CCCUGCAGUUGCUGCUUUGGCACUCGGCCCUCUGGACAGU | |
| | CCAAGAAGCGACUCCUCUCGGACCUGCCUCAUCGUUGCCG | |
| | CAGUCAUUCCUUUUGAAGUGUCUGGAGCAGGUGCGAAAG | |
| | AUUCAGGGCGAUGGAGCCGCACUCCAAGAGAAGCUCUGCG | |
| | CGACAUACAAACUUUGCCAUCCCGAGGAGCUCGUACUGCU | |
| | CGGGCACAGCUUGGGGAUUCCCUGGGCUCCUCUCUCGUCC | |
| | UGUCCGUCGCAGGCUUUGCAGUUGGCAGGGUGCCUUUCCC | |
| | AGCUCCACUCCGGUUUGUUCUUGUAUCAGGGACUGCUGCA | |
| | AGCCCUUGAGGGAAUCUCGCCAGAAUUGGGCCCGACGCUG | |
| | GACACGUUGCAGCUCGACGUGGCGGAUUUCGCAACAACCA | |
| | UCUGGCAGCAGAUGGAGGAACUGGGGAUGGCACCCGCGCU | |
| | GCAGCCCACGCAGGGGGCAAUGCCGGCCUUUGCGUCCGCG | |
| | UUUCAGCGCAGGGCGGGUGGAGUCCUCGUAGCGAGCCACC | |
| | UUCAAUCAUUUUUGGAAGUCUCGUACCGGGUGCUGAGACA | |
| | UCUUGCGCAGCCG | |
| | UGAUAAUAG | |
| | GCUGGAGCCUCGGUGGCCAUGCUUCUUGCCCCUUGGGCCU | |
| | CCCCCCAGCCCCUCCUCCCCUUCCUGCACCCGUACCCCCGU | |
| | GGUCUUUGAAUAAAGUCUGAGUGGGCGGC | |
| G-CSF | Optimized G-CSF cDNA sequence containing a T7 polymerase site, | 5009 |
| with an | IRES, a polyA tail of 80 nucleotides and Asc1 restriction site: | |
| IRES, a | TAATACGACTCACTATA | |
| human | GGGAAATAAGAGAGAAAAGAAGAGTAAGAAGAAATATAAG | |
| alpha- | AGCCACC | |
| globin | TCGTGAGGATCTATTTCCGGTGAATTCCTCGAGACTAGTTCT | |
| 3′UTR | AGAGCGGCCGCGGATCCCGCCCCTCTCCCTCCCCCCCCCCTA | |
| and a | ACGTTACTGGCCGAAGCCGCTTGGAATAAGGCCGGTGTGCG | |
| polyA | TTTGTCTATATGTTATTTTCCACCATATTGCCGTCTTTTGGCA | |
| tail of 80 | ATGTGAGGGCCCGGAAACCTGGCCCTGTCTTCTTGACGAGC | |
| nucleotides | ATTCCTAGGGGTCTTTCCCCTCTCGCCAAAGGAATGCAAGGT | |
| | CTGTTGAATGTCGTGAAGGAAGCAGTTCCTCTGGAAGCTTCT | |
| | TGAAGACAAACAACGTCTGTAGCGACCCTTTGCAGGCAGCG | |
| | GAACCCCCCACCTGGCGACAGGTGCCTCTGCGGCCAAAAGC | |
| | CACGTGTATAAGATACACCTGCAAAGGCGGCACAACCCCAG | |
| | TGCCACGTTGTGAGTTGGATAGTTGTGGAAAGAGTCAAATG | |
| | GCTCACCTCAAGCGTATTCAACAAGGGGCTGAAGGATGCCC | |
| | AGAAGGTACCCCATTGTATGGGATCTGATCTGGGGCCTCGG | |
| | TGCACATGCTTTACATGTGTTTAGTCGAGGTTAAAAAACGTC | |
| | TAGGCCCCCCGAACCACGGGGACGTGGTTTTCCTTTGAAAA | |
| | ACACGATGATAAT | |
| | ATGGCCGGTCCCGCGACCCAAAGCCCCATGAAACTTATGGC | |
| | CCTGCAGTTGCTGCTTTGGCACTCGGCCCTCTGGACAGTCCA | |
| | AGAAGCGACTCCTCTCGGACCTGCCTCATCGTTGCCGCAGTC | |
| | ATTCCTTTTGAAGTGTCTGGAGCAGGTGCGAAAGATTCAGG | |
| | GCGATGGAGCCGCACTCCAAGAGAAGCTCTGCGCGACATAC | |
| | AAACTTTGCCATCCCGAGGAGCTCGTACTGCTCGGGCACAG | |
| | CTTGGGGATTCCCTGGGCTCCTCTCTCGTCCTGTCCGTCGCA | |
| | GGCTTTGCAGTTGGCAGGGTGCCTTTCCCAGCTCCACTCCGG | |
| | TTTGTTCTTGTATCAGGGACTGCTGCAAGCCCTTGAGGGAAT | |
| | CTCGCCAGAATTGGGCCCGACGCTGGACACGTTGCAGCTCG | |
| | ACGTGGCGGATTTCGCAACAACCATCTGGCAGCAGATGGAG | |
| | GAACTGGGGATGGCACCCGCGCTGCAGCCCACGCAGGGGG | |
| | CAATGCCGGCCTTTGCGTCCGCGTTTCAGCGCAGGGCGGGT | |
| | GGAGTCCTCGTAGCGAGCCACCTTCAATCATTTTTGGAAGTC | |
| | TCGTACCGGGTGCTGAGACATCTTGCGCAGCCG | |
| | TGATAATAG | |
| | GCTGGAGCCTCGGTGGCCATGCTTCTTGCCCCTTGGGCCTCC | |
| | CCCCAGCCCCTCCTCCCCTTCCTGCACCCGTACCCCCGTGGT | |
| | CTTTGAATAAAGTCTGAGTGGGCGGCAAAAAAAAAAAAAA | |
| | AAAAAAAAAAAAAAAAAAAAAAAAAAAAAAAAAAAAAAA | |
| | AAAAAAAAAAAAAAAAAAAAAAAAAAAGGCGCGCC | |
| | mRNA sequence (transcribed): | 5010 |
| | GGGAAAUAAGAGAGAAAAGAAGAGUAAGAAGAAAUAUAA | |
| | GAGCCACC | |
| | UCGUGAGGAUCUAUUUCCGGUGAAUUCCUCGAGACUAGUU | |
| | CUAGAGCGGCCGCGGAUCCCGCCCCUCUCCCUCCCCCCCCC | |
| | CUAACGUUACUGGCCGAAGCCGCUUGGAAUAAGGCCGGUG | |
| | UGCGUUUGUCUAUAUGUUAUUUUCCACCAUAUUGCCGUCU | |
| | UUUGGCAAUGUGAGGGCCCGGAAACCUGGCCCUGUCUUCU | |
| | UGACGAGCAUUCCUAGGGGUCUUUCCCCUCUCGCCAAAGG | |
| | AAUGCAAGGUCUGUUGAAUGUCGUGAAGGAAGCAGUUCC | |
| | UCUGGAAGCUUCUUGAAGACAAACAACGUCUGUAGCGACC | |
| | CUUUGCAGGCAGCGGAACCCCCCACCUGGCGACAGGUGCC | |
| | UCUGCGGCCAAAAGCCACGUGUAUAAGAUACACCUGCAAA | |
| | GGCGGCACAACCCCAGUGCCACGUUGUGAGUUGGAUAGUU | |
| | GUGGAAAGAGUCAAAUGGCUCACCUCAAGCGUAUUCAACA | |
| | AGGGGCUGAAGGAUGCCCAGAAGGUACCCCAUUGUAUGGG | |
| | AUCUGAUCUGGGGCCUCGGUGCACAUGCUUUACAUGUGUU | |
| | UAGUCGAGGUUAAAAAACGUCUAGGCCCCCCGAACCACGG | |
| | GGACGUGGUUUUCCUUUGAAAAACACGAUGAUAAU | |
| | AUGGCCGGUCCCGCGACCCAAAGCCCCAUGAAACUUAUGG | |
| | CCCUGCAGUUGCUGCUUUGGCACUCGGCCCUCUGGACAGU | |
| | CCAAGAAGCGACUCCUCUCGGACCUGCCUCAUCGUUGCCG | |
| | CAGUCAUUCCUUUUGAAGUGUCUGGAGCAGGUGCGAAAG | |
| | AUUCAGGGCGAUGGAGCCGCACUCCAAGAGAAGCUCUGCG | |
| | CGACAUACAAACUUUGCCAUCCCGAGGAGCUCGUACUGCU | |
| | CGGGCACAGCUUGGGGAUUCCCUGGGCUCCUCUCUCGUCC | |
| | UGUCCGUCGCAGGCUUUGCAGUUGGCAGGGUGCCUUUCCC | |
| | AGCUCCACUCCGGUUUGUUCUUGUAUCAGGGACUGCUGCA | |
| | AGCCCUUGAGGGAAUCUCGCCAGAAUUGGGCCCGACGCUG | |
| | GACACGUUGCAGCUCGACGUGGCGGAUUUCGCAACAACCA | |
| | UCUGGCAGCAGAUGGAGGAACUGGGGAUGGCACCCGCGCU | |
| | GCAGCCCACGCAGGGGGCAAUGCCGGCCUUUGCGUCCGCG | |
| | UUUCAGCGCAGGGCGGGUGGAGUCCUCGUAGCGAGCCACC | |
| | UUCAAUCAUUUUUGGAAGUCUCGUACCGGGUGCUGAGACA | |
| | UCUUGCGCAGCCG | |
| | UGAUAAUAG | |
| | GCUGGAGCCUCGGUGGCCAUGCUUCUUGCCCCUUGGGCCU | |
| | CCCCCCAGCCCCUCCUCCCCUUCCUGCACCCGUACCCCCGU | |
| | GGUCUUUGAAUAAAGUCUGAGUGGGCGGC | |
| | AAAAAAAAAAAAAAAAAAAAAAAAAAAAAAAAAAAAAAA | |
| | AAAAAAAAAAAAAAAAAAAAAAAAAAAAAAAAAAAAAAA | |
| | AA | |
| G-CSF | Optimized G-CSF cDNA sequence containing a T7 polymerase site, | 5011 |
| without a | an IRES sequence, a polyA tail of 80 nucleotides and Asc1 restriction | |
| Kozak | site: | |
| sequence | TAATACGACTCACTATA | |
| and with | GGGAAATAAGAGAGAAAAGAAGAGTAAGAAGAAATATAAGA | |
| an IRES, | TCGTGAGGATCTATTTCCGGTGAATTCCTCGAGACTAGTTCT | |
| a human | AGAGCGGCCGCGGATCCCGCCCCTCTCCCTCCCCCCCCCCTA | |
| alpha- | ACGTTACTGGCCGAAGCCGCTTGGAATAAGGCCGGTGTGCG | |
| globin | TTTGTCTATATGTTATTTTCCACCATATTGCCGTCTTTTGGCA | |
| 3′UTR | ATGTGAGGGCCCGGAAACCTGGCCCTGTCTTCTTGACGAGC | |
| and a | ATTCCTAGGGGTCTTTCCCCTCTCGCCAAAGGAATGCAAGGT | |
| polyA | CTGTTGAATGTCGTGAAGGAAGCAGTTCCTCTGGAAGCTTCT | |
| tail of 80 | TGAAGACAAACAACGTCTGTAGCGACCCTTTGCAGGCAGCG | |
| nucleotides | GAACCCCCCACCTGGCGACAGGTGCCTCTGCGGCCAAAAGC | |
| | CACGTGTATAAGATACACCTGCAAAGGCGGCACAACCCCAG | |
| | TGCCACGTTGTGAGTTGGATAGTTGTGGAAAGAGTCAAATG | |
| | GCTCACCTCAAGCGTATTCAACAAGGGGCTGAAGGATGCCC | |
| | AGAAGGTACCCCATTGTATGGGATCTGATCTGGGGCCTCGG | |
| | TGCACATGCTTTACATGTGTTTAGTCGAGGTTAAAAAACGTC | |
| | TAGGCCCCCCGAACCACGGGGACGTGGTTTTCCTTTGAAAA | |
| | ACACGATGATAAT | |
| | ATGGCCGGTCCCGCGACCCAAAGCCCCATGAAACTTATGGC | |
| | CCTGCAGTTGCTGCTTTGGCACTCGGCCCTCTGGACAGTCCA | |
| | AGAAGCGACTCCTCTCGGACCTGCCTCATCGTTGCCGCAGTC | |
| | ATTCCTTTTGAAGTGTCTGGAGCAGGTGCGAAAGATTCAGG | |
| | GCGATGGAGCCGCACTCCAAGAGAAGCTCTGCGCGACATAC | |
| | AAACTTTGCCATCCCGAGGAGCTCGTACTGCTCGGGCACAG | |
| | CTTGGGGATTCCCTGGGCTCCTCTCTCGTCCTGTCCGTCGCA | |
| | GGCTTTGCAGTTGGCAGGGTGCCTTTCCCAGCTCCACTCCGG | |
| | TTTGTTCTTGTATCAGGGACTGCTGCAAGCCCTTGAGGGAAT | |
| | CTCGCCAGAATTGGGCCCGACGCTGGACACGTTGCAGCTCG | |
| | ACGTGGCGGATTTCGCAACAACCATCTGGCAGCAGATGGAG | |
| | GAACTGGGGATGGCACCCGCGCTGCAGCCCACGCAGGGGG | |
| | CAATGCCGGCCTTTGCGTCCGCGTTTCAGCGCAGGGCGGGT | |
| | GGAGTCCTCGTAGCGAGCCACCTTCAATCATTTTTGGAAGTC | |
| | TCGTACCGGGTGCTGAGACATCTTGCGCAGCCG | |
| | TGATAATAG | |
| | GCTGGAGCCTCGGTGGCCATGCTTCTTGCCCCTTGGGCCTCC | |
| | CCCCAGCCCCTCCTCCCCTTCCTGCACCCGTACCCCCGTGGT | |
| | CTTTGAATAAAGTCTGAGTGGGCGGCAAAAAAAAAAAAAA | |
| | AAAAAAAAAAAAAAAAAAAAAAAAAAAAAAAAAAAAAAA | |
| | AAAAAAAAAAAAAAAAAAAAAAAAAAAGGCGCGCC | |
| | mRNA sequence (transcribed): | 5012 |
| | GGGAAAUAAGAGAGAAAAGAAGAGUAAGAAGAAAUAUAA | |
| | GA | |
| | UCGUGAGGAUCUAUUUCCGGUGAAUUCCUCGAGACUAGUU | |
| | CUAGAGCGGCCGCGGAUCCCGCCCCUCUCCCUCCCCCCCCC | |
| | CUAACGUUACUGGCCGAAGCCGCUUGGAAUAAGGCCGGUG | |
| | UGCGUUUGUCUAUAUGUUAUUUUCCACCAUAUUGCCGUCU | |
| | UUUGGCAAUGUGAGGGCCCGGAAACCUGGCCCUGUCUUCU | |
| | UGACGAGCAUUCCUAGGGGUCUUUCCCCUCUCGCCAAAGG | |
| | AAUGCAAGGUCUGUUGAAUGUCGUGAAGGAAGCAGUUCC | |
| | UCUGGAAGCUUCUUGAAGACAAACAACGUCUGUAGCGACC | |
| | CUUUGCAGGCAGCGGAACCCCCCACCUGGCGACAGGUGCC | |
| | UCUGCGGCCAAAAGCCACGUGUAUAAGAUACACCUGCAAA | |
| | GGCGGCACAACCCCAGUGCCACGUUGUGAGUUGGAUAGUU | |
| | GUGGAAAGAGUCAAAUGGCUCACCUCAAGCGUAUUCAACA | |
| | AGGGGCUGAAGGAUGCCCAGAAGGUACCCCAUUGUAUGGG | |
| | AUCUGAUCUGGGGCCUCGGUGCACAUGCUUUACAUGUGUU | |
| | UAGUCGAGGUUAAAAAACGUCUAGGCCCCCCGAACCACGG | |
| | GGACGUGGUUUUCCUUUGAAAAACACGAUGAUAAU | |
| | AUGGCCGGUCCCGCGACCCAAAGCCCCAUGAAACUUAUGG | |
| | CCCUGCAGUUGCUGCUUUGGCACUCGGCCCUCUGGACAGU | |
| | CCAAGAAGCGACUCCUCUCGGACCUGCCUCAUCGUUGCCG | |
| | CAGUCAUUCCUUUUGAAGUGUCUGGAGCAGGUGCGAAAG | |
| | AUUCAGGGCGAUGGAGCCGCACUCCAAGAGAAGCUCUGCG | |
| | CGACAUACAAACUUUGCCAUCCCGAGGAGCUCGUACUGCU | |
| | CGGGCACAGCUUGGGGAUUCCCUGGGCUCCUCUCUCGUCC | |
| | UGUCCGUCGCAGGCUUUGCAGUUGGCAGGGUGCCUUUCCC | |
| | AGCUCCACUCCGGUUUGUUCUUGUAUCAGGGACUGCUGCA | |
| | AGCCCUUGAGGGAAUCUCGCCAGAAUUGGGCCCGACGCUG | |
| | GACACGUUGCAGCUCGACGUGGCGGAUUUCGCAACAACCA | |
| | UCUGGCAGCAGAUGGAGGAACUGGGGAUGGCACCCGCGCU | |
| | GCAGCCCACGCAGGGGGCAAUGCCGGCCUUUGCGUCCGCG | |
| | UUUCAGCGCAGGGCGGGUGGAGUCCUCGUAGCGAGCCACC | |
| | UUCAAUCAUUUUUGGAAGUCUCGUACCGGGUGCUGAGACA | |
| | UCUUGCGCAGCCG | |
| | UGAUAAUAG | |
| | GCUGGAGCCUCGGUGGCCAUGCUUCUUGCCCCUUGGGCCU | |
| | CCCCCCAGCCCCUCCUCCCCUUCCUGCACCCGUACCCCCGU | |
| | GGUCUUUGAAUAAAGUCUGAGUGGGCGGCAAAAAAAAAA | |
| | AAAAAAAAAAAAAAAAAAAAAAAAAAAAAAAAAAAAAAA | |
| | AAAAAAAAAAAAAAAAAAAAAAAAAAAAAAA | |
| G-CSF | Optimized G-CSF cDNA sequence containing a T7 polymerase site, a | 5013 |
| with a | polyA tail of 80 nucleotides and Asc1 restriction site: | |
| human | TAATACGACTCACTATA | |
| alpha- | GGGAAATAAGAGAGAAAAGAAGAGTAAGAAGAAATATAAG | |
| globin | AGCCACC | |
| 3′UTR | ATGGCCGGTCCCGCGACCCAAAGCCCCATGAAACTTATGGC | |
| and a | CCTGCAGTTGCTGCTTTGGCACTCGGCCCTCTGGACAGTCCA | |
| polyA | AGAAGCGACTCCTCTCGGACCTGCCTCATCGTTGCCGCAGTC | |
| tail of 80 | ATTCCTTTTGAAGTGTCTGGAGCAGGTGCGAAAGATTCAGG | |
| nucleotides | GCGATGGAGCCGCACTCCAAGAGAAGCTCTGCGCGACATAC | |
| | AAACTTTGCCATCCCGAGGAGCTCGTACTGCTCGGGCACAG | |
| | CTTGGGGATTCCCTGGGCTCCTCTCTCGTCCTGTCCGTCGCA | |
| | GGCTTTGCAGTTGGCAGGGTGCCTTTCCCAGCTCCACTCCGG | |
| | TTTGTTCTTGTATCAGGGACTGCTGCAAGCCCTTGAGGGAAT | |
| | CTCGCCAGAATTGGGCCCGACGCTGGACACGTTGCAGCTCG | |
| | ACGTGGCGGATTTCGCAACAACCATCTGGCAGCAGATGGAG | |
| | GAACTGGGGATGGCACCCGCGCTGCAGCCCACGCAGGGGG | |
| | CAATGCCGGCCTTTGCGTCCGCGTTTCAGCGCAGGGCGGGT | |
| | GGAGTCCTCGTAGCGAGCCACCTTCAATCATTTTTGGAAGTC | |
| | TCGTACCGGGTGCTGAGACATCTTGCGCAGCCG | |
| | TGATAATAG | |
| | GCTGGAGCCTCGGTGGCCATGCTTCTTGCCCCTTGGGCCTCC | |
| | CCCCAGCCCCTCCTCCCCTTCCTGCACCCGTACCCCCGTGGT | |
| | CTTTGAATAAAGTCTGAGTGGGCGGCAAAAAAAAAAAAAA | |
| | AAAAAAAAAAAAAAAAAAAAAAAAAAAAAAAAAAAAAAA | |
| | AAAAAAAAAAAAAAAAAAAAAAAAAAAGGCGCGCC | |
| | mRNA sequence (transcribed): | 5014 |
| | GGGAAAUAAGAGAGAAAAGAAGAGUAAGAAGAAAUAUAA | |
| | GAGCCACC | |
| | AUGGCCGGUCCCGCGACCCAAAGCCCCAUGAAACUUAUGG | |
| | CCCUGCAGUUGCUGCUUUGGCACUCGGCCCUCUGGACAGU | |
| | CCAAGAAGCGACUCCUCUCGGACCUGCCUCAUCGUUGCCG | |
| | CAGUCAUUCCUUUUGAAGUGUCUGGAGCAGGUGCGAAAG | |
| | AUUCAGGGCGAUGGAGCCGCACUCCAAGAGAAGCUCUGCG | |
| | CGACAUACAAACUUUGCCAUCCCGAGGAGCUCGUACUGCU | |
| | CGGGCACAGCUUGGGGAUUCCCUGGGCUCCUCUCUCGUCC | |
| | UGUCCGUCGCAGGCUUUGCAGUUGGCAGGGUGCCUUUCCC | |
| | AGCUCCACUCCGGUUUGUUCUUGUAUCAGGGACUGCUGCA | |
| | AGCCCUUGAGGGAAUCUCGCCAGAAUUGGGCCCGACGCUG | |
| | GACACGUUGCAGCUCGACGUGGCGGAUUUCGCAACAACCA | |
| | UCUGGCAGCAGAUGGAGGAACUGGGGAUGGCACCCGCGCU | |
| | GCAGCCCACGCAGGGGGCAAUGCCGGCCUUUGCGUCCGCG | |
| | UUUCAGCGCAGGGCGGGUGGAGUCCUCGUAGCGAGCCACC | |
| | UUCAAUCAUUUUUGGAAGUCUCGUACCGGGUGCUGAGACA | |
| | UCUUGCGCAGCCG | |
| | UGAUAAUAG | |
| | GCUGGAGCCUCGGUGGCCAUGCUUCUUGCCCCUUGGGCCU | |
| | CCCCCCAGCCCCUCCUCCCCUUCCUGCACCCGUACCCCCGU | |
| | GGUCUUUGAAUAAAGUCUGAGUGGGCGGCAAAAAAAAAA | |
| | AAAAAAAAAAAAAAAAAAAAAAAAAAAAAAAAAAAAAAA | |
| | AAAAAAAAAAAAAAAAAAAAAAAAAAAAAAA | |
| G-CSF | Optimized G-CSF cDNA sequence containing a T7 polymerase site, a | 5015 |
| without a | polyA tail of 80 nucleotides and Asc1 restriction site: | |
| kozak | TAATACGACTCACTATA | |
| sequence | GGGAAATAAGAGAGAAAAGAAGAGTAAGAAGAAATATAAGA | |
| and with | ATGGCCGGTCCCGCGACCCAAAGCCCCATGAAACTTATGGC | |
| a human | CCTGCAGTTGCTGCTTTGGCACTCGGCCCTCTGGACAGTCCA | |
| alpha- | AGAAGCGACTCCTCTCGGACCTGCCTCATCGTTGCCGCAGTC | |
| globin | ATTCCTTTTGAAGTGTCTGGAGCAGGTGCGAAAGATTCAGG | |
| 3′UTR | GCGATGGAGCCGCACTCCAAGAGAAGCTCTGCGCGACATAC | |
| and a | AAACTTTGCCATCCCGAGGAGCTCGTACTGCTCGGGCACAG | |
| polyA | CTTGGGGATTCCCTGGGCTCCTCTCTCGTCCTGTCCGTCGCA | |
| tail of 80 | GGCTTTGCAGTTGGCAGGGTGCCTTTCCCAGCTCCACTCCGG | |
| nucleotides | TTTGTTCTTGTATCAGGGACTGCTGCAAGCCCTTGAGGGAAT | |
| | CTCGCCAGAATTGGGCCCGACGCTGGACACGTTGCAGCTCG | |
| | ACGTGGCGGATTTCGCAACAACCATCTGGCAGCAGATGGAG | |
| | GAACTGGGGATGGCACCCGCGCTGCAGCCCACGCAGGGGG | |
| | CAATGCCGGCCTTTGCGTCCGCGTTTCAGCGCAGGGCGGGT | |
| | GGAGTCCTCGTAGCGAGCCACCTTCAATCATTTTTGGAAGTC | |
| | TCGTACCGGGTGCTGAGACATCTTGCGCAGCCG | |
| | TGATAATAG | |
| | GCTGGAGCCTCGGTGGCCATGCTTCTTGCCCCTTGGGCCTCC | |
| | CCCCAGCCCCTCCTCCCCTTCCTGCACCCGTACCCCCGTGGT | |
| | CTTTGAATAAAGTCTGAGTGGGCGGCAAAAAAAAAAAAAA | |
| | AAAAAAAAAAAAAAAAAAAAAAAAAAAAAAAAAAAAAAA | |
| | AAAAAAAAAAAAAAAAAAAAAAAAAAAGGCGCGCC | |
| | mRNA sequence (transcribed): | 5016 |
| | GGGAAAUAAGAGAGAAAAGAAGAGUAAGAAGAAAUAUAA | |
| | GA | |
| | AUGGCCGGUCCCGCGACCCAAAGCCCCAUGAAACUUAUGG | |
| | CCCUGCAGUUGCUGCUUUGGCACUCGGCCCUCUGGACAGU | |
| | CCAAGAAGCGACUCCUCUCGGACCUGCCUCAUCGUUGCCG | |
| | CAGUCAUUCCUUUUGAAGUGUCUGGAGCAGGUGCGAAAG | |
| | AUUCAGGGCGAUGGAGCCGCACUCCAAGAGAAGCUCUGCG | |
| | CGACAUACAAACUUUGCCAUCCCGAGGAGCUCGUACUGCU | |
| | CGGGCACAGCUUGGGGAUUCCCUGGGCUCCUCUCUCGUCC | |
| | UGUCCGUCGCAGGCUUUGCAGUUGGCAGGGUGCCUUUCCC | |
| | AGCUCCACUCCGGUUUGUUCUUGUAUCAGGGACUGCUGCA | |
| | AGCCCUUGAGGGAAUCUCGCCAGAAUUGGGCCCGACGCUG | |
| | GACACGUUGCAGCUCGACGUGGCGGAUUUCGCAACAACCA | |
| | UCUGGCAGCAGAUGGAGGAACUGGGGAUGGCACCCGCGCU | |
| | GCAGCCCACGCAGGGGGCAAUGCCGGCCUUUGCGUCCGCG | |
| | UUUCAGCGCAGGGCGGGUGGAGUCCUCGUAGCGAGCCACC | |
| | UUCAAUCAUUUUUGGAAGUCUCGUACCGGGUGCUGAGACA | |
| | UCUUGCGCAGCCG | |
| | UGAUAAUAG | |
| | GCUGGAGCCUCGGUGGCCAUGCUUCUUGCCCCUUGGGCCU | |
| | CCCCCCAGCCCCUCCUCCCCUUCCUGCACCCGUACCCCCGU | |
| | GGUCUUUGAAUAAAGUCUGAGUGGGCGGCAAAAAAAAAA | |
| | AAAAAAAAAAAAAAAAAAAAAAAAAAAAAAAAAAAAAAA | |
| | AAAAAAAAAAAAAAAAAAAAAAAAAAAAAAA | |

[1020] These modified mRNA sequences can include at least one chemical modification described herein. The G-CSF modified mRNA sequence can be formulated, using methods described herein and/or known in the art, prior to transfection and/or administration.

[1021] The modified mRNA sequence encoding G-CSF can be transfected in vitro to various cell types such as HEK293, HeLa, PBMC and BJ fibroblast and those described in Table 25 using methods disclosed herein and/or are known in the art. The cells are then analyzed using methods disclosed herein and/or are known in the art to determine the concentration of G-CSF and/or cell viability.

[1022] The modified mRNA sequence encoding G-CSF can also be administered to mammals including mat, rats, non-human primates and humans. The serum and surrounding tissue can be collected at pre-determined intervals and analyzed using methods disclosed herein and/or are known in the art to determine the concentration of G-CSF and other pharmacokinetic properties mentioned herein.

### Example 32. Modified mRNA Sequences miR-122 Sequences in an Alpha-Globin UTR

[1023] Modified mRNA encoding G-CSF or Factor IX with a mir-122 sequence in a human or mouse alpha-globin 3′UTR, and their corresponding cDNA sequences, are shown below in Table 31. In Table 31, the start codon of each sequence is underlined.

TABLE 31
G-CSF and FIX Sequences

| | | SEQ |
|---|---|---|
| | | ID |
| Description | Sequence | NO: |
| G-CSF with | Optimized G-CSF cDNA sequence containing a T7 polymerase site | 5017 |
| 1 miR-122 | and Xba1 restriction site: | |
| sequence in | TAATACGACTCACTATA | |
| human | GGGAAATAAGAGAGAAAAGAAGAGTAAGAAGAAATATAA | |
| alpha-globin | GAGCCACC | |
| 3′UTR | ATGGCCGGTCCCGCGACCCAAAGCCCCATGAAACTTATGGC | |
| | CCTGCAGTTGCTGCTTTGGCACTCGGCCCTCTGGACAGTCCA | |
| | AGAAGCGACTCCTCTCGGACCTGCCTCATCGTTGCCGCAGT | |
| | CATTCCTTTTGAAGTGTCTGGAGCAGGTGCGAAAGATTCAG | |
| | GGCGATGGAGCCGCACTCCAAGAGAAGCTCTGCGCGACATA | |
| | CAAACTTTGCCATCCCGAGGAGCTCGTACTGCTCGGGCACA | |
| | GCTTGGGGATTCCCTGGGCTCCTCTCTCGTCCTGTCCGTCGC | |
| | AGGCTTTGCAGTTGGCAGGGTGCCTTTCCCAGCTCCACTCCG | |
| | GTTTGTTCTTGTATCAGGGACTGCTGCAAGCCCTTGAGGGA | |
| | ATCTCGCCAGAATTGGGCCCGACGCTGGACACGTTGCAGCT | |
| | CGACGTGGCGGATTTCGCAACAACCATCTGGCAGCAGATGG | |
| | AGGAACTGGGGATGGCACCCGCGCTGCAGCCCACGCAGGG | |
| | GGCAATGCCGGCCTTTGCGTCCGCGTTTCAGCGCAGGGCGG | |
| | GTGGAGTCCTCGTAGCGAGCCACCTTCAATCATTTTTGGAA | |
| | GTCTCGTACCGGGTGCTGAGACATCTTGCGCAGCCG | |
| | TGATAATAG | |
| | GCTGGAGCCTCGGTGGCCATGCTTCTTGCCCCTTGGGCCTCC | |
| | CCCCAGCCCCTCCTCCCCTTCCTGCACCCGTACCCCCCAAAC | |
| | ACCATTGTCACACTCCAGTGGTCTTTGAATAAAGTCTGAGTG | |
| | GGCGGCTCTAGA | |
| | mRNA sequence (transcribed): | 5018 |
| | GGGAAAUAAGAGAGAAAAGAAGAGUAAGAAGAAAUAUAA | |
| | GAGCCACC | |
| | AUGGCCGGUCCCGCGACCCAAAGCCCCAUGAAACUUAUGG | |
| | CCCUGCAGUUGCUGCUUUGGCACUCGGCCCUCUGGACAGU | |
| | CCAAGAAGCGACUCCUCUCGGACCUGCCUCAUCGUUGCCG | |
| | CAGUCAUUCCUUUUGAAGUGUCUGGAGCAGGUGCGAAAG | |
| | AUUCAGGGCGAUGGAGCCGCACUCCAAGAGAAGCUCUGCG | |
| | CGACAUACAAACUUUGCCAUCCCGAGGAGCUCGUACUGCU | |
| | CGGGCACAGCUUGGGGAUUCCCUGGGCUCCUCUCUCGUCC | |
| | UGUCCGUCGCAGGCUUUGCAGUUGGCAGGGUGCCUUUCCC | |
| | AGCUCCACUCCGGUUUGUUCUUGUAUCAGGGACUGCUGCA | |
| | AGCCCUUGAGGGAAUCUCGCCAGAAUUGGGCCCGACGCUG | |
| | GACACGUUGCAGCUCGACGUGGCGGAUUUCGCAACAACCA | |
| | UCUGGCAGCAGAUGGAGGAACUGGGGAUGGCACCCGCGCU | |
| | GCAGCCCACGCAGGGGGCAAUGCCGGCCUUUGCGUCCGCG | |
| | UUUCAGCGCAGGGCGGGUGGAGUCCUCGUAGCGAGCCACC | |
| | UUCAAUCAUUUUUGGAAGUCUCGUACCGGGUGCUGAGAC | |
| | AUCUUGCGCAGCCG | |
| | UGAUAAUAG | |
| | GCUGGAGCCUCGGUGGCCAUGCUUCUUGCCCCUUGGGCCU | |
| | CCCCCCAGCCCCUCCUCCCCUUCCUGCACCCGUACCCCCCA | |
| | AACACCAUUGUCACACUCCAGUGGUCUUUGAAUAAAGUCU | |
| | GAGUGGGCGGC | |
| G-CSF with | Optimized G-CSF cDNA sequence containing a T7 polymerase site | 5019 |
| 1 miR-122 | and Xba1 restriction site: | |
| seed | TAATACGACTCACTATA | |
| sequence in | GGGAAATAAGAGAGAAAAGAAGAGTAAGAAGAAATATAA | |
| human | GAGCCACC | |
| alpha-globin | ATGGCCGGTCCCGCGACCCAAAGCCCCATGAAACTTATGGC | |
| 3′UTR | CCTGCAGTTGCTGCTTTGGCACTCGGCCCTCTGGACAGTCCA | |
| | AGAAGCGACTCCTCTCGGACCTGCCTCATCGTTGCCGCAGT | |
| | CATTCCTTTTGAAGTGTCTGGAGCAGGTGCGAAAGATTCAG | |
| | GGCGATGGAGCCGCACTCCAAGAGAAGCTCTGCGCGACATA | |
| | CAAACTTTGCCATCCCGAGGAGCTCGTACTGCTCGGGCACA | |
| | GCTTGGGGATTCCCTGGGCTCCTCTCTCGTCCTGTCCGTCGC | |
| | AGGCTTTGCAGTTGGCAGGGTGCCTTTCCCAGCTCCACTCCG | |
| | GTTTGTTCTTGTATCAGGGACTGCTGCAAGCCCTTGAGGGA | |
| | ATCTCGCCAGAATTGGGCCCGACGCTGGACACGTTGCAGCT | |
| | CGACGTGGCGGATTTCGCAACAACCATCTGGCAGCAGATGG | |
| | AGGAACTGGGGATGGCACCCGCGCTGCAGCCCACGCAGGG | |
| | GGCAATGCCGGCCTTTGCGTCCGCGTTTCAGCGCAGGGCGG | |
| | GTGGAGTCCTCGTAGCGAGCCACCTTCAATCATTTTTGGAA | |
| | GTCTCGTACCGGGTGCTGAGACATCTTGCGCAGCCG | |
| | TGATAATAG | |
| | GCTGGAGCCTCGGTGGCCATGCTTCTTGCCCCTTGGGCCTCC | |
| | CCCCAGCCCCTCCTCCCCTTCCTGCACCCGTACCCCCACACT | |
| | CCGTGGTCTTTGAATAAAGTCTGAGTGGGCGGCTCTAGA | |
| | mRNA sequence (transcribed): | 5020 |
| | GGGAAAUAAGAGAGAAAAGAAGAGUAAGAAGAAAUAUAA | |
| | GAGCCACC | |
| | AUGGCCGGUCCCGCGACCCAAAGCCCCAUGAAACUUAUGG | |
| | CCCUGCAGUUGCUGCUUUGGCACUCGGCCCUCUGGACAGU | |
| | CCAAGAAGCGACUCCUCUCGGACCUGCCUCAUCGUUGCCG | |
| | CAGUCAUUCCUUUUGAAGUGUCUGGAGCAGGUGCGAAAG | |
| | AUUCAGGGCGAUGGAGCCGCACUCCAAGAGAAGCUCUGCG | |
| | CGACAUACAAACUUUGCCAUCCCGAGGAGCUCGUACUGCU | |
| | CGGGCACAGCUUGGGGAUUCCCUGGGCUCCUCUCUCGUCC | |
| | UGUCCGUCGCAGGCUUUGCAGUUGGCAGGGUGCCUUUCCC | |
| | AGCUCCACUCCGGUUUGUUCUUGUAUCAGGGACUGCUGCA | |
| | AGCCCUUGAGGGAAUCUCGCCAGAAUUGGGCCCGACGCUG | |
| | GACACGUUGCAGCUCGACGUGGCGGAUUUCGCAACAACCA | |
| | UCUGGCAGCAGAUGGAGGAACUGGGGAUGGCACCCGCGCU | |
| | GCAGCCCACGCAGGGGGCAAUGCCGGCCUUUGCGUCCGCG | |
| | UUUCAGCGCAGGGCGGGUGGAGUCCUCGUAGCGAGCCACC | |
| | UUCAAUCAUUUUUGGAAGUCUCGUACCGGGUGCUGAGAC | |
| | AUCUUGCGCAGCCG | |
| | UGAUAAUAG | |
| | GCUGGAGCCUCGGUGGCCAUGCUUCUUGCCCCUUGGGCCU | |
| | CCCCCCAGCCCCUCCUCCCCUUCCUGCACCCGUACCCCCAC | |
| | ACUCCGUGGUCUUUGAAUAAAGUCUGAGUGGGCGGC | |
| G-CSF with | Optimized G-CSF cDNA sequence containing a T7 polymerase site | 5021 |
| 1 miR-122 | and Xba1 restriction site: | |
| sequence | TAATACGACTCACTATA | |
| without the | GGGAAATAAGAGAGAAAAGAAGAGTAAGAAGAAATATAA | |
| seed in | GAGCCACC | |
| human | ATGGCCGGTCCCGCGACCCAAAGCCCCATGAAACTTATGGC | |
| alpha-globin | CCTGCAGTTGCTGCTTTGGCACTCGGCCCTCTGGACAGTCCA | |
| 3′UTR | AGAAGCGACTCCTCTCGGACCTGCCTCATCGTTGCCGCAGT | |
| | CATTCCTTTTGAAGTGTCTGGAGCAGGTGCGAAAGATTCAG | |
| | GGCGATGGAGCCGCACTCCAAGAGAAGCTCTGCGCGACATA | |
| | CAAACTTTGCCATCCCGAGGAGCTCGTACTGCTCGGGCACA | |
| | GCTTGGGGATTCCCTGGGCTCCTCTCTCGTCCTGTCCGTCGC | |
| | AGGCTTTGCAGTTGGCAGGGTGCCTTTCCCAGCTCCACTCCG | |
| | GTTTGTTCTTGTATCAGGGACTGCTGCAAGCCCTTGAGGGA | |
| | ATCTCGCCAGAATTGGGCCCGACGCTGGACACGTTGCAGCT | |
| | CGACGTGGCGGATTTCGCAACAACCATCTGGCAGCAGATGG | |
| | AGGAACTGGGGATGGCACCCGCGCTGCAGCCCACGCAGGG | |
| | GGCAATGCCGGCCTTTGCGTCCGCGTTTCAGCGCAGGGCGG | |
| | GTGGAGTCCTCGTAGCGAGCCACCTTCAATCATTTTTGGAA | |
| | GTCTCGTACCGGGTGCTGAGACATCTTGCGCAGCCG | |
| | TGATAATAG | |
| | GCTGGAGCCTCGGTGGCCATGCTTCTTGCCCCTTGGGCCTCC | |
| | CCCCAGCCCCTCCTCCCCTTCCTGCACCCGTACCCCCCAAAC | |
| | ACCATTGTCAGTGGTCTTTGAATAAAGTCTGAGTGGGCGGC | |
| | TCTAGA | |
| | mRNA sequence (transcribed): | 5022 |
| | GGGAAAUAAGAGAGAAAAGAAGAGUAAGAAGAAAUAUAA | |
| | GAGCCACC | |
| | AUGGCCGGUCCCGCGACCCAAAGCCCCAUGAAACUUAUGG | |
| | CCCUGCAGUUGCUGCUUUGGCACUCGGCCCUCUGGACAGU | |
| | CCAAGAAGCGACUCCUCUCGGACCUGCCUCAUCGUUGCCG | |
| | CAGUCAUUCCUUUUGAAGUGUCUGGAGCAGGUGCGAAAG | |
| | AUUCAGGGCGAUGGAGCCGCACUCCAAGAGAAGCUCUGCG | |
| | CGACAUACAAACUUUGCCAUCCCGAGGAGCUCGUACUGCU | |
| | CGGGCACAGCUUGGGGAUUCCCUGGGCUCCUCUCUCGUCC | |
| | UGUCCGUCGCAGGCUUUGCAGUUGGCAGGGUGCCUUUCCC | |
| | AGCUCCACUCCGGUUUGUUCUUGUAUCAGGGACUGCUGCA | |
| | AGCCCUUGAGGGAAUCUCGCCAGAAUUGGGCCCGACGCUG | |
| | GACACGUUGCAGCUCGACGUGGCGGAUUUCGCAACAACCA | |
| | UCUGGCAGCAGAUGGAGGAACUGGGGAUGGCACCCGCGCU | |
| | GCAGCCCACGCAGGGGGCAAUGCCGGCCUUUGCGUCCGCG | |
| | UUUCAGCGCAGGGCGGGUGGAGUCCUCGUAGCGAGCCACC | |
| | UUCAAUCAUUUUUGGAAGUCUCGUACCGGGUGCUGAGAC | |
| | AUCUUGCGCAGCCG | |
| | UGAUAAUAG | |
| | GCUGGAGCCUCGGUGGCCAUGCUUCUUGCCCCUUGGGCCU | |
| | CCCCCCAGCCCCUCCUCCCCUUCCUGCACCCGUACCCCCCA | |
| | AACACCAUUGUCAGUGGUCUUUGAAUAAAGUCUGAGUGG | |
| | GCGGC | |
| G-CSF with | Optimized G-CSF cDNA sequence containing a T7 polymerase site | 5023 |
| 1 miR-122 | and Xba1 restriction site: | |
| sequence in | TAATACGACTCACTATA | |
| mouse | GGGAAATAAGAGAGAAAAGAAGAGTAAGAAGAAATATAA | |
| alpha-globin | GAGCCACC | |
| 3′UTR | ATGGCCGGTCCCGCGACCCAAAGCCCCATGAAACTTATGGC | |
| | CCTGCAGTTGCTGCTTTGGCACTCGGCCCTCTGGACAGTCCA | |
| | AGAAGCGACTCCTCTCGGACCTGCCTCATCGTTGCCGCAGT | |
| | CATTCCTTTTGAAGTGTCTGGAGCAGGTGCGAAAGATTCAG | |
| | GGCGATGGAGCCGCACTCCAAGAGAAGCTCTGCGCGACATA | |
| | CAAACTTTGCCATCCCGAGGAGCTCGTACTGCTCGGGCACA | |
| | GCTTGGGGATTCCCTGGGCTCCTCTCTCGTCCTGTCCGTCGC | |
| | AGGCTTTGCAGTTGGCAGGGTGCCTTTCCCAGCTCCACTCCG | |
| | GTTTGTTCTTGTATCAGGGACTGCTGCAAGCCCTTGAGGGA | |
| | ATCTCGCCAGAATTGGGCCCGACGCTGGACACGTTGCAGCT | |
| | CGACGTGGCGGATTTCGCAACAACCATCTGGCAGCAGATGG | |
| | AGGAACTGGGGATGGCACCCGCGCTGCAGCCCACGCAGGG | |
| | GGCAATGCCGGCCTTTGCGTCCGCGTTTCAGCGCAGGGCGG | |
| | GTGGAGTCCTCGTAGCGAGCCACCTTCAATCATTTTTGGAA | |
| | GTCTCGTACCGGGTGCTGAGACATCTTGCGCAGCCG | |
| | TGATAATAG | |
| | GCTGCCTTCTGCGGGGCTTGCCTTCTGGCCATGCCCTTCTTC | |
| | TCTCCCTTGCACCTGTACCTCTCAAACACCATTGTCACACTC | |
| | CATGGTCTTTGAATAAAGCCTGAGTAGGAAGGCGGCCGCTC | |
| | GAGCATGCATCTAGA | |
| | mRNA sequence (transcribed): | 5024 |
| | GGGAAAUAAGAGAGAAAAGAAGAGUAAGAAGAAAUAUAA | |
| | GAGCCACC | |
| | AUGGCCGGUCCCGCGACCCAAAGCCCCAUGAAACUUAUGG | |
| | CCCUGCAGUUGCUGCUUUGGCACUCGGCCCUCUGGACAGU | |
| | CCAAGAAGCGACUCCUCUCGGACCUGCCUCAUCGUUGCCG | |
| | CAGUCAUUCCUUUUGAAGUGUCUGGAGCAGGUGCGAAAG | |
| | AUUCAGGGCGAUGGAGCCGCACUCCAAGAGAAGCUCUGCG | |
| | CGACAUACAAACUUUGCCAUCCCGAGGAGCUCGUACUGCU | |
| | CGGGCACAGCUUGGGGAUUCCCUGGGCUCCUCUCUCGUCC | |
| | UGUCCGUCGCAGGCUUUGCAGUUGGCAGGGUGCCUUUCCC | |
| | AGCUCCACUCCGGUUUGUUCUUGUAUCAGGGACUGCUGCA | |
| | AGCCCUUGAGGGAAUCUCGCCAGAAUUGGGCCCGACGCUG | |
| | GACACGUUGCAGCUCGACGUGGCGGAUUUCGCAACAACCA | |
| | UCUGGCAGCAGAUGGAGGAACUGGGGAUGGCACCCGCGCU | |
| | GCAGCCCACGCAGGGGGCAAUGCCGGCCUUUGCGUCCGCG | |
| | UUUCAGCGCAGGGCGGGUGGAGUCCUCGUAGCGAGCCACC | |
| | UUCAAUCAUUUUUGGAAGUCUCGUACCGGGUGCUGAGAC | |
| | AUCUUGCGCAGCCG | |
| | UGAUAAUAG | |
| | GCUGCCUUCUGCGGGGCUUGCCUUCUGGCCAUGCCCUUCU | |
| | UCUCUCCCUUGCACCUGUACCUCUCAAACACCAUUGUCAC | |
| | ACUCCAUGGUCUUUGAAUAAAGCCUGAGUAGGAAG | |
| G-CSF with | Optimized G-CSF cDNA sequence containing a T7 polymerase site | 5025 |
| 1 miR-122 | and Xba1 restriction site: | |
| seed | TAATACGACTCACTATA | |
| sequence in | GGGAAATAAGAGAGAAAAGAAGAGTAAGAAGAAATATAA | |
| mouse | GAGCCACC | |
| alpha-globin | ATGGCCGGTCCCGCGACCCAAAGCCCCATGAAACTTATGGC | |
| 3′UTR | CCTGCAGTTGCTGCTTTGGCACTCGGCCCTCTGGACAGTCCA | |
| | AGAAGCGACTCCTCTCGGACCTGCCTCATCGTTGCCGCAGT | |
| | CATTCCTTTTGAAGTGTCTGGAGCAGGTGCGAAAGATTCAG | |
| | GGCGATGGAGCCGCACTCCAAGAGAAGCTCTGCGCGACATA | |
| | CAAACTTTGCCATCCCGAGGAGCTCGTACTGCTCGGGCACA | |
| | GCTTGGGGATTCCCTGGGCTCCTCTCTCGTCCTGTCCGTCGC | |
| | AGGCTTTGCAGTTGGCAGGGTGCCTTTCCCAGCTCCACTCCG | |
| | GTTTGTTCTTGTATCAGGGACTGCTGCAAGCCCTTGAGGGA | |
| | ATCTCGCCAGAATTGGGCCCGACGCTGGACACGTTGCAGCT | |
| | CGACGTGGCGGATTTCGCAACAACCATCTGGCAGCAGATGG | |
| | AGGAACTGGGGATGGCACCCGCGCTGCAGCCCACGCAGGG | |
| | GGCAATGCCGGCCTTTGCGTCCGCGTTTCAGCGCAGGGCGG | |
| | GTGGAGTCCTCGTAGCGAGCCACCTTCAATCATTTTTGGAA | |
| | GTCTCGTACCGGGTGCTGAGACATCTTGCGCAGCCG | |
| | TGATAATAG | |
| | GCTGCCTTCTGCGGGGCTTGCCTTCTGGCCATGCCCTTCTTC | |
| | TCTCCCTTGCACCTGTACCTCTACACTCCTGGTCTTTGAATA | |
| | AAGCCTGAGTAGGAAGGCGGCCGCTCGAGCATGCATCTAGA | |
| | mRNA sequence (transcribed): | 5026 |
| | GGGAAAUAAGAGAGAAAAGAAGAGUAAGAAGAAAUAUAA | |
| | GAGCCACC | |
| | AUGGCCGGUCCCGCGACCCAAAGCCCCAUGAAACUUAUGG | |
| | CCCUGCAGUUGCUGCUUUGGCACUCGGCCCUCUGGACAGU | |
| | CCAAGAAGCGACUCCUCUCGGACCUGCCUCAUCGUUGCCG | |
| | CAGUCAUUCCUUUUGAAGUGUCUGGAGCAGGUGCGAAAG | |
| | AUUCAGGGCGAUGGAGCCGCACUCCAAGAGAAGCUCUGCG | |
| | CGACAUACAAACUUUGCCAUCCCGAGGAGCUCGUACUGCU | |
| | CGGGCACAGCUUGGGGAUUCCCUGGGCUCCUCUCUCGUCC | |
| | UGUCCGUCGCAGGCUUUGCAGUUGGCAGGGUGCCUUUCCC | |
| | AGCUCCACUCCGGUUUGUUCUUGUAUCAGGGACUGCUGCA | |
| | AGCCCUUGAGGGAAUCUCGCCAGAAUUGGGCCCGACGCUG | |
| | GACACGUUGCAGCUCGACGUGGCGGAUUUCGCAACAACCA | |
| | UCUGGCAGCAGAUGGAGGAACUGGGGAUGGCACCCGCGCU | |
| | GCAGCCCACGCAGGGGGCAAUGCCGGCCUUUGCGUCCGCG | |
| | UUUCAGCGCAGGGCGGGUGGAGUCCUCGUAGCGAGCCACC | |
| | UUCAAUCAUUUUUGGAAGUCUCGUACCGGGUGCUGAGAC | |
| | AUCUUGCGCAGCCG | |
| | UGAUAAUAG | |
| | GCUGCCUUCUGCGGGGCUUGCCUUCUGGCCAUGCCCUUCU | |
| | UCUCUCCCUUGCACCUGUACCUCUACACUCCUGGUCUUUG | |
| | AAUAAAGCCUGAGUAGGAAG | |
| G-CSF with | Optimized G-CSF cDNA sequence containing a T7 polymerase site | 5027 |
| 1 miR-122 | and Xba1 restriction site: | |
| sequence | TAATACGACTCACTATA | |
| without the | GGGAAATAAGAGAGAAAAGAAGAGTAAGAAGAAATATAA | |
| seed in | GAGCCACC | |
| mouse | ATGGCCGGTCCCGCGACCCAAAGCCCCATGAAACTTATGGC | |
| alpha-globin | CCTGCAGTTGCTGCTTTGGCACTCGGCCCTCTGGACAGTCCA | |
| 3′UTR | AGAAGCGACTCCTCTCGGACCTGCCTCATCGTTGCCGCAGT | |
| | CATTCCTTTTGAAGTGTCTGGAGCAGGTGCGAAAGATTCAG | |
| | GGCGATGGAGCCGCACTCCAAGAGAAGCTCTGCGCGACATA | |
| | CAAACTTTGCCATCCCGAGGAGCTCGTACTGCTCGGGCACA | |
| | GCTTGGGGATTCCCTGGGCTCCTCTCTCGTCCTGTCCGTCGC | |
| | AGGCTTTGCAGTTGGCAGGGTGCCTTTCCCAGCTCCACTCCG | |
| | GTTTGTTCTTGTATCAGGGACTGCTGCAAGCCCTTGAGGGA | |
| | ATCTCGCCAGAATTGGGCCCGACGCTGGACACGTTGCAGCT | |
| | CGACGTGGCGGATTTCGCAACAACCATCTGGCAGCAGATGG | |
| | AGGAACTGGGGATGGCACCCGCGCTGCAGCCCACGCAGGG | |
| | GGCAATGCCGGCCTTTGCGTCCGCGTTTCAGCGCAGGGCGG | |
| | GTGGAGTCCTCGTAGCGAGCCACCTTCAATCATTTTTGGAA | |
| | GTCTCGTACCGGGTGCTGAGACATCTTGCGCAGCCG | |
| | TGATAATAG | |
| | GCTGCCTTCTGCGGGGCTTGCCTTCTGGCCATGCCCTTCTTC | |
| | TCTCCCTTGCACCTGTACCTCTCAAACACCATTGTCATGGTC | |
| | TTTGAATAAAGCCTGAGTAGGAAGGCGGCCGCTCGAGCATG | |
| | CATCTAGA | |
| | mRNA sequence (transcribed): | 5028 |
| | GGGAAAUAAGAGAGAAAAGAAGAGUAAGAAGAAAUAUAA | |
| | GAGCCACC | |
| | AUGGCCGGUCCCGCGACCCAAAGCCCCAUGAAACUUAUGG | |
| | CCCUGCAGUUGCUGCUUUGGCACUCGGCCCUCUGGACAGU | |
| | CCAAGAAGCGACUCCUCUCGGACCUGCCUCAUCGUUGCCG | |
| | CAGUCAUUCCUUUUGAAGUGUCUGGAGCAGGUGCGAAAG | |
| | AUUCAGGGCGAUGGAGCCGCACUCCAAGAGAAGCUCUGCG | |
| | CGACAUACAAACUUUGCCAUCCCGAGGAGCUCGUACUGCU | |
| | CGGGCACAGCUUGGGGAUUCCCUGGGCUCCUCUCUCGUCC | |
| | UGUCCGUCGCAGGCUUUGCAGUUGGCAGGGUGCCUUUCCC | |
| | AGCUCCACUCCGGUUUGUUCUUGUAUCAGGGACUGCUGCA | |
| | AGCCCUUGAGGGAAUCUCGCCAGAAUUGGGCCCGACGCUG | |
| | GACACGUUGCAGCUCGACGUGGCGGAUUUCGCAACAACCA | |
| | UCUGGCAGCAGAUGGAGGAACUGGGGAUGGCACCCGCGCU | |
| | GCAGCCCACGCAGGGGGCAAUGCCGGCCUUUGCGUCCGCG | |
| | UUUCAGCGCAGGGCGGGUGGAGUCCUCGUAGCGAGCCACC | |
| | UUCAAUCAUUUUUGGAAGUCUCGUACCGGGUGCUGAGAC | |
| | AUCUUGCGCAGCCG | |
| | UGAUAAUAG | |
| | GCUGCCUUCUGCGGGGCUUGCCUUCUGGCCAUGCCCUUCU | |
| | UCUCUCCCUUGCACCUGUACCUCUCAAACACCAUUGUCAU | |
| | GGUCUUUGAAUAAAGCCUGAGUAGGAAG | |
| Factor IX | Optimized Factor IX cDNA sequence containing a T7 polymerase | 5029 |
| with 1 miR- | site and Xba1 restriction site: | |
| 122 | TAATACGACTCACTATA | |
| sequence in | GGGAAATAAGAGAGAAAAGAAGAGTAAGAAGAAATATAA | |
| human | GAGCCACC | |
| alpha-globin | ATGCAGCGCGTCAACATGATTATGGCCGAATCGCCGGGACT | |
| 3′UTR | CATCACAATCTGCCTCTTGGGTTATCTCTTGTCGGCAGAATG | |
| | TACCGTGTTCTTGGATCACGAAAACGCGAACAAAATTCTTA | |
| | ATCGCCCGAAGCGGTATAACTCCGGGAAACTTGAGGAGTTT | |
| | GTGCAGGGCAATCTTGAACGAGAGTGCATGGAGGAGAAAT | |
| | GCTCCTTTGAGGAGGCGAGGGAAGTGTTTGAAAACACAGAG | |
| | CGAACAACGGAGTTTTGGAAGCAATACGTAGATGGGGACC | |
| | AGTGTGAGTCGAATCCGTGCCTCAATGGGGGATCATGTAAA | |
| | GATGACATCAATAGCTATGAATGCTGGTGCCCGTTTGGGTTT | |
| | GAAGGGAAGAACTGTGAGCTGGATGTGACGTGCAACATCA | |
| | AAAACGGACGCTGTGAGCAGTTTTGTAAGAACTCGGCTGAC | |
| | AATAAGGTAGTATGCTCGTGCACAGAGGGATACCGGCTGGC | |
| | GGAGAACCAAAAATCGTGCGAGCCCGCAGTCCCGTTCCCTT | |
| | GTGGGAGGGTGAGCGTGTCACAGACTAGCAAGTTGACGAG | |
| | AGCGGAGACTGTATTCCCCGACGTGGACTACGTCAACAGCA | |
| | CCGAAGCCGAAACAATCCTCGATAACATCACGCAGAGCACT | |
| | CAGTCCTTCAATGACTTTACGAGGGTCGTAGGTGGTGAGGA | |
| | CGCGAAACCCGGTCAGTTCCCCTGGCAGGTGGTATTGAACG | |
| | GAAAAGTCGATGCCTTTTGTGGAGGTTCCATTGTCAACGAG | |
| | AAGTGGATTGTCACAGCGGCACACTGCGTAGAAACAGGAGT | |
| | GAAAATCACGGTAGTGGCGGGAGAGCATAACATTGAAGAG | |
| | ACAGAGCACACGGAACAAAAGCGAAATGTCATCAGAATCA | |
| | TTCCACACCATAACTATAACGCGGCAATCAATAAGTACAAT | |
| | CACGACATCGCACTTTTGGAGCTTGACGAACCTTTGGTGCTT | |
| | AATTCGTACGTCACCCCTATTTGTATTGCCGACAAAGAGTAT | |
| | ACAAACATCTTCTTGAAATTCGGCTCCGGGTACGTATCGGG | |
| | CTGGGGCAGAGTGTTCCATAAGGGTAGATCCGCACTGGTGT | |
| | TGCAATACCTCAGGGTGCCCCTCGTGGATCGAGCCACTTGT | |
| | CTGCGGTCCACCAAATTCACAATCTACAACAATATGTTCTGT | |
| | GCGGGATTCCATGAAGGTGGGAGAGATAGCTGCCAGGGAG | |
| | ACTCAGGGGGTCCCCACGTGACGGAAGTCGAGGGGACGTC | |
| | ATTTCTGACGGGAATTATCTCATGGGGAGAGGAATGTGCGA | |
| | TGAAGGGGAAATATGGCATCTACACTAAAGTGTCACGGTAT | |
| | GTCAATTGGATCAAGGAAAAGACGAAACTCACG | |
| | TGATAATAG | |
| | GCTGGAGCCTCGGTGGCCATGCTTCTTGCCCCTTGGGCCTCC | |
| | CCCCAGCCCCTCCTCCCCTTCCTGCACCCGTACCCCCCAAAC | |
| | ACCATTGTCACACTCCAGTGGTCTTTGAATAAAGTCTGAGTG | |
| | GGCGGCTCTAGA | |
| | mRNA sequence (transcribed): | 5030 |
| | GGGAAAUAAGAGAGAAAAGAAGAGUAAGAAGAAAUAUAA | |
| | GAGCCACC | |
| | AUGCAGCGCGUCAACAUGAUUAUGGCCGAAUCGCCGGGAC | |
| | UCAUCACAAUCUGCCUCUUGGGUUAUCUCUUGUCGGCAGA | |
| | AUGUACCGUGUUCUUGGAUCACGAAAACGCGAACAAAAU | |
| | UCUUAAUCGCCCGAAGCGGUAUAACUCCGGGAAACUUGAG | |
| | GAGUUUGUGCAGGGCAAUCUUGAACGAGAGUGCAUGGAG | |
| | GAGAAAUGCUCCUUUGAGGAGGCGAGGGAAGUGUUUGAA | |
| | AACACAGAGCGAACAACGGAGUUUUGGAAGCAAUACGUA | |
| | GAUGGGGACCAGUGUGAGUCGAAUCCGUGCCUCAAUGGG | |
| | GGAUCAUGUAAAGAUGACAUCAAUAGCUAUGAAUGCUGG | |
| | UGCCCGUUUGGGUUUGAAGGGAAGAACUGUGAGCUGGAU | |
| | GUGACGUGCAACAUCAAAAACGGACGCUGUGAGCAGUUU | |
| | UGUAAGAACUCGGCUGACAAUAAGGUAGUAUGCUCGUGC | |
| | ACAGAGGGAUACCGGCUGGCGGAGAACCAAAAAUCGUGCG | |
| | AGCCCGCAGUCCCGUUCCCUUGUGGGAGGGUGAGCGUGUC | |
| | ACAGACUAGCAAGUUGACGAGAGCGGAGACUGUAUUCCCC | |
| | GACGUGGACUACGUCAACAGCACCGAAGCCGAAACAAUCC | |
| | UCGAUAACAUCACGCAGAGCACUCAGUCCUUCAAUGACUU | |
| | UACGAGGGUCGUAGGUGGUGAGGACGCGAAACCCGGUCA | |
| | GUUCCCCUGGCAGGUGGUAUUGAACGGAAAAGUCGAUGCC | |
| | UUUUGUGGAGGUUCCAUUGUCAACGAGAAGUGGAUUGUC | |
| | ACAGCGGCACACUGCGUAGAAACAGGAGUGAAAAUCACGG | |
| | UAGUGGCGGGAGAGCAUAACAUUGAAGAGACAGAGCACA | |
| | CGGAACAAAAGCGAAAUGUCAUCAGAAUCAUUCCACACCA | |
| | UAACUAUAACGCGGCAAUCAAUAAGUACAAUCACGACAUC | |
| | GCACUUUUGGAGCUUGACGAACCUUUGGUGCUUAAUUCG | |
| | UACGUCACCCCUAUUUGUAUUGCCGACAAAGAGUAUACAA | |
| | ACAUCUUCUUGAAAUUCGGCUCCGGGUACGUAUCGGGCUG | |
| | GGGCAGAGUGUUCCAUAAGGGUAGAUCCGCACUGGUGUU | |
| | GCAAUACCUCAGGGUGCCCCUCGUGGAUCGAGCCACUUGU | |
| | CUGCGGUCCACCAAAUUCACAAUCUACAACAAUAUGUUCU | |
| | GUGCGGGAUUCCAUGAAGGUGGGAGAGAUAGCUGCCAGG | |
| | GAGACUCAGGGGGUCCCCACGUGACGGAAGUCGAGGGGAC | |
| | GUCAUUUCUGACGGGAAUUAUCUCAUGGGGAGAGGAAUG | |
| | UGCGAUGAAGGGGAAAUAUGGCAUCUACACUAAAGUGUC | |
| | ACGGUAUGUCAAUUGGAUCAAGGAAAAGACGAAACUCACG | |
| | UGAUAAUAG | |
| | GCUGGAGCCUCGGUGGCCAUGCUUCUUGCCCCUUGGGCCU | |
| | CCCCCCAGCCCCUCCUCCCCUUCCUGCACCCGUACCCCCCA | |
| | AACACCAUUGUCACACUCCAGUGGUCUUUGAAUAAAGUCU | |
| | GAGUGGGCGGC | |
| Factor IX | Optimized Factor IX cDNA sequence containing a T7 polymerase site | 5031 |
| with 1 miR- | and Xba1 restriction site: | |
| 122 seed | TAATACGACTCACTATA | |
| sequence in | GGGAAATAAGAGAGAAAAGAAGAGTAAGAAGAAATATAA | |
| human | GAGCCACC | |
| alpha-globin | ATGCAGCGCGTCAACATGATTATGGCCGAATCGCCGGGACT | |
| 3′UTR | CATCACAATCTGCCTCTTGGGTTATCTCTTGTCGGCAGAATG | |
| | TACCGTGTTCTTGGATCACGAAAACGCGAACAAAATTCTTA | |
| | ATCGCCCGAAGCGGTATAACTCCGGGAAACTTGAGGAGTTT | |
| | GTGCAGGGCAATCTTGAACGAGAGTGCATGGAGGAGAAAT | |
| | GCTCCTTTGAGGAGGCGAGGGAAGTGTTTGAAAACACAGAG | |
| | CGAACAACGGAGTTTTGGAAGCAATACGTAGATGGGGACC | |
| | AGTGTGAGTCGAATCCGTGCCTCAATGGGGGATCATGTAAA | |
| | GATGACATCAATAGCTATGAATGCTGGTGCCCGTTTGGGTTT | |
| | GAAGGGAAGAACTGTGAGCTGGATGTGACGTGCAACATCA | |
| | AAAACGGACGCTGTGAGCAGTTTTGTAAGAACTCGGCTGAC | |
| | AATAAGGTAGTATGCTCGTGCACAGAGGGATACCGGCTGGC | |
| | GGAGAACCAAAAATCGTGCGAGCCCGCAGTCCCGTTCCCTT | |
| | GTGGGAGGGTGAGCGTGTCACAGACTAGCAAGTTGACGAG | |
| | AGCGGAGACTGTATTCCCCGACGTGGACTACGTCAACAGCA | |
| | CCGAAGCCGAAACAATCCTCGATAACATCACGCAGAGCACT | |
| | CAGTCCTTCAATGACTTTACGAGGGTCGTAGGTGGTGAGGA | |
| | CGCGAAACCCGGTCAGTTCCCCTGGCAGGTGGTATTGAACG | |
| | GAAAAGTCGATGCCTTTTGTGGAGGTTCCATTGTCAACGAG | |
| | AAGTGGATTGTCACAGCGGCACACTGCGTAGAAACAGGAGT | |
| | GAAAATCACGGTAGTGGCGGGAGAGCATAACATTGAAGAG | |
| | ACAGAGCACACGGAACAAAAGCGAAATGTCATCAGAATCA | |
| | TTCCACACCATAACTATAACGCGGCAATCAATAAGTACAAT | |
| | CACGACATCGCACTTTTGGAGCTTGACGAACCTTTGGTGCTT | |
| | AATTCGTACGTCACCCCTATTTGTATTGCCGACAAAGAGTAT | |
| | ACAAACATCTTCTTGAAATTCGGCTCCGGGTACGTATCGGG | |
| | CTGGGGCAGAGTGTTCCATAAGGGTAGATCCGCACTGGTGT | |
| | TGCAATACCTCAGGGTGCCCCTCGTGGATCGAGCCACTTGT | |
| | CTGCGGTCCACCAAATTCACAATCTACAACAATATGTTCTGT | |
| | GCGGGATTCCATGAAGGTGGGAGAGATAGCTGCCAGGGAG | |
| | ACTCAGGGGGTCCCCACGTGACGGAAGTCGAGGGGACGTC | |
| | ATTTCTGACGGGAATTATCTCATGGGGAGAGGAATGTGCGA | |
| | TGAAGGGGAAATATGGCATCTACACTAAAGTGTCACGGTAT | |
| | GTCAATTGGATCAAGGAAAAGACGAAACTCACG | |
| | TGATAATAG | |
| | GCTGGAGCCTCGGTGGCCATGCTTCTTGCCCCTTGGGCCTCC | |
| | CCCCAGCCCCTCCTCCCCTTCCTGCACCCGTACCCCCACACT | |
| | CCGTGGTCTTTGAATAAAGTCTGAGTGGGCGGCTCTAGA | |
| | mRNA sequence (transcribed): | 5032 |
| | GGGAAAUAAGAGAGAAAAGAAGAGUAAGAAGAAAUAUAA | |
| | GAGCCACC | |
| | AUGCAGCGCGUCAACAUGAUUAUGGCCGAAUCGCCGGGAC | |
| | UCAUCACAAUCUGCCUCUUGGGUUAUCUCUUGUCGGCAGA | |
| | AUGUACCGUGUUCUUGGAUCACGAAAACGCGAACAAAAU | |
| | UCUUAAUCGCCCGAAGCGGUAUAACUCCGGGAAACUUGAG | |
| | GAGUUUGUGCAGGGCAAUCUUGAACGAGAGUGCAUGGAG | |
| | GAGAAAUGCUCCUUUGAGGAGGCGAGGGAAGUGUUUGAA | |
| | AACACAGAGCGAACAACGGAGUUUUGGAAGCAAUACGUA | |
| | GAUGGGGACCAGUGUGAGUCGAAUCCGUGCCUCAAUGGG | |
| | GGAUCAUGUAAAGAUGACAUCAAUAGCUAUGAAUGCUGG | |
| | UGCCCGUUUGGGUUUGAAGGGAAGAACUGUGAGCUGGAU | |
| | GUGACGUGCAACAUCAAAAACGGACGCUGUGAGCAGUUU | |
| | UGUAAGAACUCGGCUGACAAUAAGGUAGUAUGCUCGUGC | |
| | ACAGAGGGAUACCGGCUGGCGGAGAACCAAAAAUCGUGCG | |
| | AGCCCGCAGUCCCGUUCCCUUGUGGGAGGGUGAGCGUGUC | |
| | ACAGACUAGCAAGUUGACGAGAGCGGAGACUGUAUUCCCC | |
| | GACGUGGACUACGUCAACAGCACCGAAGCCGAAACAAUCC | |
| | UCGAUAACAUCACGCAGAGCACUCAGUCCUUCAAUGACUU | |
| | UACGAGGGUCGUAGGUGGUGAGGACGCGAAACCCGGUCA | |
| | GUUCCCCUGGCAGGUGGUAUUGAACGGAAAAGUCGAUGCC | |
| | UUUUGUGGAGGUUCCAUUGUCAACGAGAAGUGGAUUGUC | |
| | ACAGCGGCACACUGCGUAGAAACAGGAGUGAAAAUCACGG | |
| | UAGUGGCGGGAGAGCAUAACAUUGAAGAGACAGAGCACA | |
| | CGGAACAAAAGCGAAAUGUCAUCAGAAUCAUUCCACACCA | |
| | UAACUAUAACGCGGCAAUCAAUAAGUACAAUCACGACAUC | |
| | GCACUUUUGGAGCUUGACGAACCUUUGGUGCUUAAUUCG | |
| | UACGUCACCCCUAUUUGUAUUGCCGACAAAGAGUAUACAA | |
| | ACAUCUUCUUGAAAUUCGGCUCCGGGUACGUAUCGGGCUG | |
| | GGGCAGAGUGUUCCAUAAGGGUAGAUCCGCACUGGUGUU | |
| | GCAAUACCUCAGGGUGCCCCUCGUGGAUCGAGCCACUUGU | |
| | CUGCGGUCCACCAAAUUCACAAUCUACAACAAUAUGUUCU | |
| | GUGCGGGAUUCCAUGAAGGUGGGAGAGAUAGCUGCCAGG | |
| | GAGACUCAGGGGGUCCCCACGUGACGGAAGUCGAGGGGAC | |
| | GUCAUUUCUGACGGGAAUUAUCUCAUGGGGAGAGGAAUG | |
| | UGCGAUGAAGGGGAAAUAUGGCAUCUACACUAAAGUGUC | |
| | ACGGUAUGUCAAUUGGAUCAAGGAAAAGACGAAACUCACG | |
| | UGAUAAUAG | |
| | GCUGGAGCCUCGGUGGCCAUGCUUCUUGCCCCUUGGGCCU | |
| | CCCCCCAGCCCCUCCUCCCCUUCCUGCACCCGUACCCCCAC | |
| | ACUCCGUGGUCUUUGAAUAAAGUCUGAGUGGGCGGC | |
| Factor IX | Optimized Factor IX cDNA sequence containing a T7 polymerase site | 5033 |
| with 1 miR- | and Xba1 restriction site: | |
| 122 | TAATACGACTCACTATA | |
| sequence | GGGAAATAAGAGAGAAAAGAAGAGTAAGAAGAAATATAA | |
| without the | GAGCCACC | |
| seed in | ATGCAGCGCGTCAACATGATTATGGCCGAATCGCCGGGACT | |
| human | CATCACAATCTGCCTCTTGGGTTATCTCTTGTCGGCAGAATG | |
| alpha-globin | TACCGTGTTCTTGGATCACGAAAACGCGAACAAAATTCTTA | |
| 3′UTR | ATCGCCCGAAGCGGTATAACTCCGGGAAACTTGAGGAGTTT | |
| | GTGCAGGGCAATCTTGAACGAGAGTGCATGGAGGAGAAAT | |
| | GCTCCTTTGAGGAGGCGAGGGAAGTGTTTGAAAACACAGAG | |
| | CGAACAACGGAGTTTTGGAAGCAATACGTAGATGGGGACC | |
| | AGTGTGAGTCGAATCCGTGCCTCAATGGGGGATCATGTAAA | |
| | GATGACATCAATAGCTATGAATGCTGGTGCCCGTTTGGGTTT | |
| | GAAGGGAAGAACTGTGAGCTGGATGTGACGTGCAACATCA | |
| | AAAACGGACGCTGTGAGCAGTTTTGTAAGAACTCGGCTGAC | |
| | AATAAGGTAGTATGCTCGTGCACAGAGGGATACCGGCTGGC | |
| | GGAGAACCAAAAATCGTGCGAGCCCGCAGTCCCGTTCCCTT | |
| | GTGGGAGGGTGAGCGTGTCACAGACTAGCAAGTTGACGAG | |
| | AGCGGAGACTGTATTCCCCGACGTGGACTACGTCAACAGCA | |
| | CCGAAGCCGAAACAATCCTCGATAACATCACGCAGAGCACT | |
| | CAGTCCTTCAATGACTTTACGAGGGTCGTAGGTGGTGAGGA | |
| | CGCGAAACCCGGTCAGTTCCCCTGGCAGGTGGTATTGAACG | |
| | GAAAAGTCGATGCCTTTTGTGGAGGTTCCATTGTCAACGAG | |
| | AAGTGGATTGTCACAGCGGCACACTGCGTAGAAACAGGAGT | |
| | GAAAATCACGGTAGTGGCGGGAGAGCATAACATTGAAGAG | |
| | ACAGAGCACACGGAACAAAAGCGAAATGTCATCAGAATCA | |
| | TTCCACACCATAACTATAACGCGGCAATCAATAAGTACAAT | |
| | CACGACATCGCACTTTTGGAGCTTGACGAACCTTTGGTGCTT | |
| | AATTCGTACGTCACCCCTATTTGTATTGCCGACAAAGAGTAT | |
| | ACAAACATCTTCTTGAAATTCGGCTCCGGGTACGTATCGGG | |
| | CTGGGGCAGAGTGTTCCATAAGGGTAGATCCGCACTGGTGT | |
| | TGCAATACCTCAGGGTGCCCCTCGTGGATCGAGCCACTTGT | |
| | CTGCGGTCCACCAAATTCACAATCTACAACAATATGTTCTGT | |
| | GCGGGATTCCATGAAGGTGGGAGAGATAGCTGCCAGGGAG | |
| | ACTCAGGGGGTCCCCACGTGACGGAAGTCGAGGGGACGTC | |
| | ATTTCTGACGGGAATTATCTCATGGGGAGAGGAATGTGCGA | |
| | TGAAGGGGAAATATGGCATCTACACTAAAGTGTCACGGTAT | |
| | GTCAATTGGATCAAGGAAAAGACGAAACTCACG | |
| | TGATAATAG | |
| | GCTGGAGCCTCGGTGGCCATGCTTCTTGCCCCTTGGGCCTCC | |
| | CCCCAGCCCCTCCTCCCCTTCCTGCACCCGTACCCCCCAAAC | |
| | ACCATTGTCAGTGGTCTTTGAATAAAGTCTGAGTGGGCGGC | |
| | TCTAGA | |
| | mRNA sequence (transcribed): | 5034 |
| | GGGAAAUAAGAGAGAAAAGAAGAGUAAGAAGAAAUAUAA | |
| | GAGCCACC | |
| | AUGCAGCGCGUCAACAUGAUUAUGGCCGAAUCGCCGGGAC | |
| | UCAUCACAAUCUGCCUCUUGGGUUAUCUCUUGUCGGCAGA | |
| | AUGUACCGUGUUCUUGGAUCACGAAAACGCGAACAAAAU | |
| | UCUUAAUCGCCCGAAGCGGUAUAACUCCGGGAAACUUGAG | |
| | GAGUUUGUGCAGGGCAAUCUUGAACGAGAGUGCAUGGAG | |
| | GAGAAAUGCUCCUUUGAGGAGGCGAGGGAAGUGUUUGAA | |
| | AACACAGAGCGAACAACGGAGUUUUGGAAGCAAUACGUA | |
| | GAUGGGGACCAGUGUGAGUCGAAUCCGUGCCUCAAUGGG | |
| | GGAUCAUGUAAAGAUGACAUCAAUAGCUAUGAAUGCUGG | |
| | UGCCCGUUUGGGUUUGAAGGGAAGAACUGUGAGCUGGAU | |
| | GUGACGUGCAACAUCAAAAACGGACGCUGUGAGCAGUUU | |
| | UGUAAGAACUCGGCUGACAAUAAGGUAGUAUGCUCGUGC | |
| | ACAGAGGGAUACCGGCUGGCGGAGAACCAAAAAUCGUGCG | |
| | AGCCCGCAGUCCCGUUCCCUUGUGGGAGGGUGAGCGUGUC | |
| | ACAGACUAGCAAGUUGACGAGAGCGGAGACUGUAUUCCCC | |
| | GACGUGGACUACGUCAACAGCACCGAAGCCGAAACAAUCC | |
| | UCGAUAACAUCACGCAGAGCACUCAGUCCUUCAAUGACUU | |
| | UACGAGGGUCGUAGGUGGUGAGGACGCGAAACCCGGUCA | |
| | GUUCCCCUGGCAGGUGGUAUUGAACGGAAAAGUCGAUGCC | |
| | UUUUGUGGAGGUUCCAUUGUCAACGAGAAGUGGAUUGUC | |
| | ACAGCGGCACACUGCGUAGAAACAGGAGUGAAAAUCACGG | |
| | UAGUGGCGGGAGAGCAUAACAUUGAAGAGACAGAGCACA | |
| | CGGAACAAAAGCGAAAUGUCAUCAGAAUCAUUCCACACCA | |
| | UAACUAUAACGCGGCAAUCAAUAAGUACAAUCACGACAUC | |
| | GCACUUUUGGAGCUUGACGAACCUUUGGUGCUUAAUUCG | |
| | UACGUCACCCCUAUUUGUAUUGCCGACAAAGAGUAUACAA | |
| | ACAUCUUCUUGAAAUUCGGCUCCGGGUACGUAUCGGGCUG | |
| | GGGCAGAGUGUUCCAUAAGGGUAGAUCCGCACUGGUGUU | |
| | GCAAUACCUCAGGGUGCCCCUCGUGGAUCGAGCCACUUGU | |
| | CUGCGGUCCACCAAAUUCACAAUCUACAACAAUAUGUUCU | |
| | GUGCGGGAUUCCAUGAAGGUGGGAGAGAUAGCUGCCAGG | |
| | GAGACUCAGGGGGUCCCCACGUGACGGAAGUCGAGGGGAC | |
| | GUCAUUUCUGACGGGAAUUAUCUCAUGGGGAGAGGAAUG | |
| | UGCGAUGAAGGGGAAAUAUGGCAUCUACACUAAAGUGUC | |
| | ACGGUAUGUCAAUUGGAUCAAGGAAAAGACGAAACUCACG | |
| | UGAUAAUAG | |
| | GCUGGAGCCUCGGUGGCCAUGCUUCUUGCCCCUUGGGCCU | |
| | CCCCCCAGCCCCUCCUCCCCUUCCUGCACCCGUACCCCCCA | |
| | AACACCAUUGUCAGUGGUCUUUGAAUAAAGUCUGAGUGG | |
| | GCGGC | |
| Factor IX | Optimized Factor IX cDNA sequence containing a T7 polymerase site | 5035 |
| with 1 miR- | and Xba1 restriction site: | |
| 122 | TAATACGACTCACTATA | |
| sequence in | GGGAAATAAGAGAGAAAAGAAGAGTAAGAAGAAATATAA | |
| mouse | GAGCCACC | |
| alpha-globin | ATGCAGCGCGTCAACATGATTATGGCCGAATCGCCGGGACT | |
| 3′UTR | CATCACAATCTGCCTCTTGGGTTATCTCTTGTCGGCAGAATG | |
| | TACCGTGTTCTTGGATCACGAAAACGCGAACAAAATTCTTA | |
| | ATCGCCCGAAGCGGTATAACTCCGGGAAACTTGAGGAGTTT | |
| | GTGCAGGGCAATCTTGAACGAGAGTGCATGGAGGAGAAAT | |
| | GCTCCTTTGAGGAGGCGAGGGAAGTGTTTGAAAACACAGAG | |
| | CGAACAACGGAGTTTTGGAAGCAATACGTAGATGGGGACC | |
| | AGTGTGAGTCGAATCCGTGCCTCAATGGGGGATCATGTAAA | |
| | GATGACATCAATAGCTATGAATGCTGGTGCCCGTTTGGGTTT | |
| | GAAGGGAAGAACTGTGAGCTGGATGTGACGTGCAACATCA | |
| | AAAACGGACGCTGTGAGCAGTTTTGTAAGAACTCGGCTGAC | |
| | AATAAGGTAGTATGCTCGTGCACAGAGGGATACCGGCTGGC | |
| | GGAGAACCAAAAATCGTGCGAGCCCGCAGTCCCGTTCCCTT | |
| | GTGGGAGGGTGAGCGTGTCACAGACTAGCAAGTTGACGAG | |
| | AGCGGAGACTGTATTCCCCGACGTGGACTACGTCAACAGCA | |
| | CCGAAGCCGAAACAATCCTCGATAACATCACGCAGAGCACT | |
| | CAGTCCTTCAATGACTTTACGAGGGTCGTAGGTGGTGAGGA | |
| | CGCGAAACCCGGTCAGTTCCCCTGGCAGGTGGTATTGAACG | |
| | GAAAAGTCGATGCCTTTTGTGGAGGTTCCATTGTCAACGAG | |
| | AAGTGGATTGTCACAGCGGCACACTGCGTAGAAACAGGAGT | |
| | GAAAATCACGGTAGTGGCGGGAGAGCATAACATTGAAGAG | |
| | ACAGAGCACACGGAACAAAAGCGAAATGTCATCAGAATCA | |
| | TTCCACACCATAACTATAACGCGGCAATCAATAAGTACAAT | |
| | CACGACATCGCACTTTTGGAGCTTGACGAACCTTTGGTGCTT | |
| | AATTCGTACGTCACCCCTATTTGTATTGCCGACAAAGAGTAT | |
| | ACAAACATCTTCTTGAAATTCGGCTCCGGGTACGTATCGGG | |
| | CTGGGGCAGAGTGTTCCATAAGGGTAGATCCGCACTGGTGT | |
| | TGCAATACCTCAGGGTGCCCCTCGTGGATCGAGCCACTTGT | |
| | CTGCGGTCCACCAAATTCACAATCTACAACAATATGTTCTGT | |
| | GCGGGATTCCATGAAGGTGGGAGAGATAGCTGCCAGGGAG | |
| | ACTCAGGGGGTCCCCACGTGACGGAAGTCGAGGGGACGTC | |
| | ATTTCTGACGGGAATTATCTCATGGGGAGAGGAATGTGCGA | |
| | TGAAGGGGAAATATGGCATCTACACTAAAGTGTCACGGTAT | |
| | GTCAATTGGATCAAGGAAAAGACGAAACTCACG | |
| | TGATAATAG | |
| | GCTGCCTTCTGCGGGGCTTGCCTTCTGGCCATGCCCTTCTTC | |
| | TCTCCCTTGCACCTGTACCTCTCAAACACCATTGTCACACTC | |
| | CATGGTCTTTGAATAAAGCCTGAGTAGGAAGGCGGCCGCTC | |
| | GAGCATGCATCTAGA | |
| | mRNA sequence (transcribed): | 5036 |
| | GGGAAAUAAGAGAGAAAAGAAGAGUAAGAAGAAAUAUAA | |
| | GAGCCACC | |
| | AUGCAGCGCGUCAACAUGAUUAUGGCCGAAUCGCCGGGAC | |
| | UCAUCACAAUCUGCCUCUUGGGUUAUCUCUUGUCGGCAGA | |
| | AUGUACCGUGUUCUUGGAUCACGAAAACGCGAACAAAAU | |
| | UCUUAAUCGCCCGAAGCGGUAUAACUCCGGGAAACUUGAG | |
| | GAGUUUGUGCAGGGCAAUCUUGAACGAGAGUGCAUGGAG | |
| | GAGAAAUGCUCCUUUGAGGAGGCGAGGGAAGUGUUUGAA | |
| | AACACAGAGCGAACAACGGAGUUUUGGAAGCAAUACGUA | |
| | GAUGGGGACCAGUGUGAGUCGAAUCCGUGCCUCAAUGGG | |
| | GGAUCAUGUAAAGAUGACAUCAAUAGCUAUGAAUGCUGG | |
| | UGCCCGUUUGGGUUUGAAGGGAAGAACUGUGAGCUGGAU | |
| | GUGACGUGCAACAUCAAAAACGGACGCUGUGAGCAGUUU | |
| | UGUAAGAACUCGGCUGACAAUAAGGUAGUAUGCUCGUGC | |
| | ACAGAGGGAUACCGGCUGGCGGAGAACCAAAAAUCGUGCG | |
| | AGCCCGCAGUCCCGUUCCCUUGUGGGAGGGUGAGCGUGUC | |
| | ACAGACUAGCAAGUUGACGAGAGCGGAGACUGUAUUCCCC | |
| | GACGUGGACUACGUCAACAGCACCGAAGCCGAAACAAUCC | |
| | UCGAUAACAUCACGCAGAGCACUCAGUCCUUCAAUGACUU | |
| | UACGAGGGUCGUAGGUGGUGAGGACGCGAAACCCGGUCA | |
| | GUUCCCCUGGCAGGUGGUAUUGAACGGAAAAGUCGAUGCC | |
| | UUUUGUGGAGGUUCCAUUGUCAACGAGAAGUGGAUUGUC | |
| | ACAGCGGCACACUGCGUAGAAACAGGAGUGAAAAUCACGG | |
| | UAGUGGCGGGAGAGCAUAACAUUGAAGAGACAGAGCACA | |
| | CGGAACAAAAGCGAAAUGUCAUCAGAAUCAUUCCACACCA | |
| | UAACUAUAACGCGGCAAUCAAUAAGUACAAUCACGACAUC | |
| | GCACUUUUGGAGCUUGACGAACCUUUGGUGCUUAAUUCG | |
| | UACGUCACCCCUAUUUGUAUUGCCGACAAAGAGUAUACAA | |
| | ACAUCUUCUUGAAAUUCGGCUCCGGGUACGUAUCGGGCUG | |
| | GGGCAGAGUGUUCCAUAAGGGUAGAUCCGCACUGGUGUU | |
| | GCAAUACCUCAGGGUGCCCCUCGUGGAUCGAGCCACUUGU | |
| | CUGCGGUCCACCAAAUUCACAAUCUACAACAAUAUGUUCU | |
| | GUGCGGGAUUCCAUGAAGGUGGGAGAGAUAGCUGCCAGG | |
| | GAGACUCAGGGGGUCCCCACGUGACGGAAGUCGAGGGGAC | |
| | GUCAUUUCUGACGGGAAUUAUCUCAUGGGGAGAGGAAUG | |
| | UGCGAUGAAGGGGAAAUAUGGCAUCUACACUAAAGUGUC | |
| | ACGGUAUGUCAAUUGGAUCAAGGAAAAGACGAAACUCACG | |
| | UGAUAAUAG | |
| | GCUGCCUUCUGCGGGGCUUGCCUUCUGGCCAUGCCCUUCU | |
| | UCUCUCCCUUGCACCUGUACCUCUCAAACACCAUUGUCAC | |
| | ACUCCAUGGUCUUUGAAUAAAGCCUGAGUAGGAAG | |
| Factor IX | Optimized Factor IX cDNA sequence containing a T7 polymerase site | 5037 |
| with 1 miR- | and Xba1 restriction site: | |
| 122 seed | TAATACGACTCACTATA | |
| sequence in | GGGAAATAAGAGAGAAAAGAAGAGTAAGAAGAAATATAA | |
| mouse | GAGCCACC | |
| alpha-globin | ATGCAGCGCGTCAACATGATTATGGCCGAATCGCCGGGACT | |
| 3′UTR | CATCACAATCTGCCTCTTGGGTTATCTCTTGTCGGCAGAATG | |
| | TACCGTGTTCTTGGATCACGAAAACGCGAACAAAATTCTTA | |
| | ATCGCCCGAAGCGGTATAACTCCGGGAAACTTGAGGAGTTT | |
| | GTGCAGGGCAATCTTGAACGAGAGTGCATGGAGGAGAAAT | |
| | GCTCCTTTGAGGAGGCGAGGGAAGTGTTTGAAAACACAGAG | |
| | CGAACAACGGAGTTTTGGAAGCAATACGTAGATGGGGACC | |
| | AGTGTGAGTCGAATCCGTGCCTCAATGGGGGATCATGTAAA | |
| | GATGACATCAATAGCTATGAATGCTGGTGCCCGTTTGGGTTT | |
| | GAAGGGAAGAACTGTGAGCTGGATGTGACGTGCAACATCA | |
| | AAAACGGACGCTGTGAGCAGTTTTGTAAGAACTCGGCTGAC | |
| | AATAAGGTAGTATGCTCGTGCACAGAGGGATACCGGCTGGC | |
| | GGAGAACCAAAAATCGTGCGAGCCCGCAGTCCCGTTCCCTT | |
| | GTGGGAGGGTGAGCGTGTCACAGACTAGCAAGTTGACGAG | |
| | AGCGGAGACTGTATTCCCCGACGTGGACTACGTCAACAGCA | |
| | CCGAAGCCGAAACAATCCTCGATAACATCACGCAGAGCACT | |
| | CAGTCCTTCAATGACTTTACGAGGGTCGTAGGTGGTGAGGA | |
| | CGCGAAACCCGGTCAGTTCCCCTGGCAGGTGGTATTGAACG | |
| | GAAAAGTCGATGCCTTTTGTGGAGGTTCCATTGTCAACGAG | |
| | AAGTGGATTGTCACAGCGGCACACTGCGTAGAAACAGGAGT | |
| | GAAAATCACGGTAGTGGCGGGAGAGCATAACATTGAAGAG | |
| | ACAGAGCACACGGAACAAAAGCGAAATGTCATCAGAATCA | |
| | TTCCACACCATAACTATAACGCGGCAATCAATAAGTACAAT | |
| | CACGACATCGCACTTTTGGAGCTTGACGAACCTTTGGTGCTT | |
| | AATTCGTACGTCACCCCTATTTGTATTGCCGACAAAGAGTAT | |
| | ACAAACATCTTCTTGAAATTCGGCTCCGGGTACGTATCGGG | |
| | CTGGGGCAGAGTGTTCCATAAGGGTAGATCCGCACTGGTGT | |
| | TGCAATACCTCAGGGTGCCCCTCGTGGATCGAGCCACTTGT | |
| | CTGCGGTCCACCAAATTCACAATCTACAACAATATGTTCTGT | |
| | GCGGGATTCCATGAAGGTGGGAGAGATAGCTGCCAGGGAG | |
| | ACTCAGGGGGTCCCCACGTGACGGAAGTCGAGGGGACGTC | |
| | ATTTCTGACGGGAATTATCTCATGGGGAGAGGAATGTGCGA | |
| | TGAAGGGGAAATATGGCATCTACACTAAAGTGTCACGGTAT | |
| | GTCAATTGGATCAAGGAAAAGACGAAACTCACG | |
| | TGATAATAG | |
| | GCTGCCTTCTGCGGGGCTTGCCTTCTGGCCATGCCCTTCTTC | |
| | TCTCCCTTGCACCTGTACCTCTACACTCCTGGTCTTTGAATA | |
| | AAGCCTGAGTAGGAAGGCGGCCGCTCGAGCATGCATCTAGA | |
| | mRNA sequence (transcribed): | 5038 |
| | GGGAAAUAAGAGAGAAAAGAAGAGUAAGAAGAAAUAUAA | |
| | GAGCCACC | |
| | AUGCAGCGCGUCAACAUGAUUAUGGCCGAAUCGCCGGGAC | |
| | UCAUCACAAUCUGCCUCUUGGGUUAUCUCUUGUCGGCAGA | |
| | AUGUACCGUGUUCUUGGAUCACGAAAACGCGAACAAAAU | |
| | UCUUAAUCGCCCGAAGCGGUAUAACUCCGGGAAACUUGAG | |
| | GAGUUUGUGCAGGGCAAUCUUGAACGAGAGUGCAUGGAG | |
| | GAGAAAUGCUCCUUUGAGGAGGCGAGGGAAGUGUUUGAA | |
| | AACACAGAGCGAACAACGGAGUUUUGGAAGCAAUACGUA | |
| | GAUGGGGACCAGUGUGAGUCGAAUCCGUGCCUCAAUGGG | |
| | GGAUCAUGUAAAGAUGACAUCAAUAGCUAUGAAUGCUGG | |
| | UGCCCGUUUGGGUUUGAAGGGAAGAACUGUGAGCUGGAU | |
| | GUGACGUGCAACAUCAAAAACGGACGCUGUGAGCAGUUU | |
| | UGUAAGAACUCGGCUGACAAUAAGGUAGUAUGCUCGUGC | |
| | ACAGAGGGAUACCGGCUGGCGGAGAACCAAAAAUCGUGCG | |
| | AGCCCGCAGUCCCGUUCCCUUGUGGGAGGGUGAGCGUGUC | |
| | ACAGACUAGCAAGUUGACGAGAGCGGAGACUGUAUUCCCC | |
| | GACGUGGACUACGUCAACAGCACCGAAGCCGAAACAAUCC | |
| | UCGAUAACAUCACGCAGAGCACUCAGUCCUUCAAUGACUU | |
| | UACGAGGGUCGUAGGUGGUGAGGACGCGAAACCCGGUCA | |
| | GUUCCCCUGGCAGGUGGUAUUGAACGGAAAAGUCGAUGCC | |
| | UUUUGUGGAGGUUCCAUUGUCAACGAGAAGUGGAUUGUC | |
| | ACAGCGGCACACUGCGUAGAAACAGGAGUGAAAAUCACGG | |
| | UAGUGGCGGGAGAGCAUAACAUUGAAGAGACAGAGCACA | |
| | CGGAACAAAAGCGAAAUGUCAUCAGAAUCAUUCCACACCA | |
| | UAACUAUAACGCGGCAAUCAAUAAGUACAAUCACGACAUC | |
| | GCACUUUUGGAGCUUGACGAACCUUUGGUGCUUAAUUCG | |
| | UACGUCACCCCUAUUUGUAUUGCCGACAAAGAGUAUACAA | |
| | ACAUCUUCUUGAAAUUCGGCUCCGGGUACGUAUCGGGCUG | |
| | GGGCAGAGUGUUCCAUAAGGGUAGAUCCGCACUGGUGUU | |
| | GCAAUACCUCAGGGUGCCCCUCGUGGAUCGAGCCACUUGU | |
| | CUGCGGUCCACCAAAUUCACAAUCUACAACAAUAUGUUCU | |
| | GUGCGGGAUUCCAUGAAGGUGGGAGAGAUAGCUGCCAGG | |
| | GAGACUCAGGGGGUCCCCACGUGACGGAAGUCGAGGGGAC | |
| | GUCAUUUCUGACGGGAAUUAUCUCAUGGGGAGAGGAAUG | |
| | UGCGAUGAAGGGGAAAUAUGGCAUCUACACUAAAGUGUC | |
| | ACGGUAUGUCAAUUGGAUCAAGGAAAAGACGAAACUCACG | |
| | UGAUAAUAG | |
| | GCUGCCUUCUGCGGGGCUUGCCUUCUGGCCAUGCCCUUCU | |
| | UCUCUCCCUUGCACCUGUACCUCUACACUCCUGGUCUUUG | |
| | AAUAAAGCCUGAGUAGGAAG | |
| Factor IX | Optimized Factor IX cDNA sequence containing a T7 polymerase site | 5039 |
| with 1 miR- | and Xba1 restriction site: | |
| 122 | TAATACGACTCACTATA | |
| sequence | GGGAAATAAGAGAGAAAAGAAGAGTAAGAAGAAATATAA | |
| without the | GAGCCACC | |
| seed in | ATGCAGCGCGTCAACATGATTATGGCCGAATCGCCGGGACT | |
| mouse | CATCACAATCTGCCTCTTGGGTTATCTCTTGTCGGCAGAATG | |
| alpha-globin | TACCGTGTTCTTGGATCACGAAAACGCGAACAAAATTCTTA | |
| 3′UTR | ATCGCCCGAAGCGGTATAACTCCGGGAAACTTGAGGAGTTT | |
| | GTGCAGGGCAATCTTGAACGAGAGTGCATGGAGGAGAAAT | |
| | GCTCCTTTGAGGAGGCGAGGGAAGTGTTTGAAAACACAGAG | |
| | CGAACAACGGAGTTTTGGAAGCAATACGTAGATGGGGACC | |
| | AGTGTGAGTCGAATCCGTGCCTCAATGGGGGATCATGTAAA | |
| | GATGACATCAATAGCTATGAATGCTGGTGCCCGTTTGGGTTT | |
| | GAAGGGAAGAACTGTGAGCTGGATGTGACGTGCAACATCA | |
| | AAAACGGACGCTGTGAGCAGTTTTGTAAGAACTCGGCTGAC | |
| | AATAAGGTAGTATGCTCGTGCACAGAGGGATACCGGCTGGC | |
| | GGAGAACCAAAAATCGTGCGAGCCCGCAGTCCCGTTCCCTT | |
| | GTGGGAGGGTGAGCGTGTCACAGACTAGCAAGTTGACGAG | |
| | AGCGGAGACTGTATTCCCCGACGTGGACTACGTCAACAGCA | |
| | CCGAAGCCGAAACAATCCTCGATAACATCACGCAGAGCACT | |
| | CAGTCCTTCAATGACTTTACGAGGGTCGTAGGTGGTGAGGA | |
| | CGCGAAACCCGGTCAGTTCCCCTGGCAGGTGGTATTGAACG | |
| | GAAAAGTCGATGCCTTTTGTGGAGGTTCCATTGTCAACGAG | |
| | AAGTGGATTGTCACAGCGGCACACTGCGTAGAAACAGGAGT | |
| | GAAAATCACGGTAGTGGCGGGAGAGCATAACATTGAAGAG | |
| | ACAGAGCACACGGAACAAAAGCGAAATGTCATCAGAATCA | |
| | TTCCACACCATAACTATAACGCGGCAATCAATAAGTACAAT | |
| | CACGACATCGCACTTTTGGAGCTTGACGAACCTTTGGTGCTT | |
| | AATTCGTACGTCACCCCTATTTGTATTGCCGACAAAGAGTAT | |
| | ACAAACATCTTCTTGAAATTCGGCTCCGGGTACGTATCGGG | |
| | CTGGGGCAGAGTGTTCCATAAGGGTAGATCCGCACTGGTGT | |
| | TGCAATACCTCAGGGTGCCCCTCGTGGATCGAGCCACTTGT | |
| | CTGCGGTCCACCAAATTCACAATCTACAACAATATGTTCTGT | |
| | GCGGGATTCCATGAAGGTGGGAGAGATAGCTGCCAGGGAG | |
| | ACTCAGGGGGTCCCCACGTGACGGAAGTCGAGGGGACGTC | |
| | ATTTCTGACGGGAATTATCTCATGGGGAGAGGAATGTGCGA | |
| | TGAAGGGGAAATATGGCATCTACACTAAAGTGTCACGGTAT | |
| | GTCAATTGGATCAAGGAAAAGACGAAACTCACG | |
| | TGATAATAG | |
| | GCTGCCTTCTGCGGGGCTTGCCTTCTGGCCATGCCCTTCTTC | |
| | TCTCCCTTGCACCTGTACCTCT | |
| | CAAACACCATTGTCATGGTCTTTGAATAAAGCCTGAGTAGG | |
| | AAGGCGGCCGCTCGAGCATGCATCTAGA | |
| | mRNA sequence (transcribed): | 5040 |
| | GGGAAAUAAGAGAGAAAAGAAGAGUAAGAAGAAAUAUAA | |
| | GAGCCACC | |
| | AUGCAGCGCGUCAACAUGAUUAUGGCCGAAUCGCCGGGAC | |
| | UCAUCACAAUCUGCCUCUUGGGUUAUCUCUUGUCGGCAGA | |
| | AUGUACCGUGUUCUUGGAUCACGAAAACGCGAACAAAAU | |
| | UCUUAAUCGCCCGAAGCGGUAUAACUCCGGGAAACUUGAG | |
| | GAGUUUGUGCAGGGCAAUCUUGAACGAGAGUGCAUGGAG | |
| | GAGAAAUGCUCCUUUGAGGAGGCGAGGGAAGUGUUUGAA | |
| | AACACAGAGCGAACAACGGAGUUUUGGAAGCAAUACGUA | |
| | GAUGGGGACCAGUGUGAGUCGAAUCCGUGCCUCAAUGGG | |
| | GGAUCAUGUAAAGAUGACAUCAAUAGCUAUGAAUGCUGG | |
| | UGCCCGUUUGGGUUUGAAGGGAAGAACUGUGAGCUGGAU | |
| | GUGACGUGCAACAUCAAAAACGGACGCUGUGAGCAGUUU | |
| | UGUAAGAACUCGGCUGACAAUAAGGUAGUAUGCUCGUGC | |
| | ACAGAGGGAUACCGGCUGGCGGAGAACCAAAAAUCGUGCG | |
| | AGCCCGCAGUCCCGUUCCCUUGUGGGAGGGUGAGCGUGUC | |
| | ACAGACUAGCAAGUUGACGAGAGCGGAGACUGUAUUCCCC | |
| | GACGUGGACUACGUCAACAGCACCGAAGCCGAAACAAUCC | |
| | UCGAUAACAUCACGCAGAGCACUCAGUCCUUCAAUGACUU | |
| | UACGAGGGUCGUAGGUGGUGAGGACGCGAAACCCGGUCA | |
| | GUUCCCCUGGCAGGUGGUAUUGAACGGAAAAGUCGAUGCC | |
| | UUUUGUGGAGGUUCCAUUGUCAACGAGAAGUGGAUUGUC | |
| | ACAGCGGCACACUGCGUAGAAACAGGAGUGAAAAUCACGG | |
| | UAGUGGCGGGAGAGCAUAACAUUGAAGAGACAGAGCACA | |
| | CGGAACAAAAGCGAAAUGUCAUCAGAAUCAUUCCACACCA | |
| | UAACUAUAACGCGGCAAUCAAUAAGUACAAUCACGACAUC | |
| | GCACUUUUGGAGCUUGACGAACCUUUGGUGCUUAAUUCG | |
| | UACGUCACCCCUAUUUGUAUUGCCGACAAAGAGUAUACAA | |
| | ACAUCUUCUUGAAAUUCGGCUCCGGGUACGUAUCGGGCUG | |
| | GGGCAGAGUGUUCCAUAAGGGUAGAUCCGCACUGGUGUU | |
| | GCAAUACCUCAGGGUGCCCCUCGUGGAUCGAGCCACUUGU | |
| | CUGCGGUCCACCAAAUUCACAAUCUACAACAAUAUGUUCU | |
| | GUGCGGGAUUCCAUGAAGGUGGGAGAGAUAGCUGCCAGG | |
| | GAGACUCAGGGGGUCCCCACGUGACGGAAGUCGAGGGGAC | |
| | GUCAUUUCUGACGGGAAUUAUCUCAUGGGGAGAGGAAUG | |
| | UGCGAUGAAGGGGAAAUAUGGCAUCUACACUAAAGUGUC | |
| | ACGGUAUGUCAAUUGGAUCAAGGAAAAGACGAAACUCACG | |
| | UGAUAAUAG | |
| | GCUGCCUUCUGCGGGGCUUGCCUUCUGGCCAUGCCCUUCU | |
| | UCUCUCCCUUGCACCUGUACCUCU | |
| | CAAACACCAUUGUCAUGGUCUUUGAAUAAAGCCUGAGUA | |
| | GGAAG | |

[1024] These modified mRNA sequences can include at least one chemical modification described herein. The G-CSF and/or Factor IX modified mRNA sequence can be formulated, using methods described herein and/or known in the art, prior to transfection and/or administration.

[1025] The modified mRNA sequence encoding G-CSF or Factor IX can be transfected in vitro to various cell types such as HEK293, HeLa, PBMC and BJ fibroblast and those described in Table 25 using methods disclosed herein and/or are known in the art. The cells are then analyzed using methods disclosed herein and/or are known in the art to determine the concentration of G-CSF or Factor IX and/or cell viability.

[1026] The modified mRNA sequence encoding G-CSF or Factor IX can also be administered to mammals including mat, rats, non-human primates and humans. The serum, surrounding tissue and organs can be collected at pre-determined intervals and analyzed using methods disclosed herein and/or are known in the art to determine the concentration of G-CSF or Factor IX and other pharmacokinetic properties mentioned herein.

### Example 33. Microphysioloical Systems

[1027] The polynucleotides, primary constructs and/or mmRNA described herein are formulated using one of the methods described herein such as in buffer, lipid nanoparticles and PLGA. These formulations are then administered to or contacted with microphysiological systems created from organ chips as described in International Publication Nos. WO2013086502, WO2013086486 and WO2013086505, the contents of each of which are herein incorporated by reference in its entirety.

### Example 34. Translation Enhancing Elements (TEEs) in Untranslated Regions

[1028] The 5′ and/or 3′ untranslated regions (UTRs) in the polynucleotides, primary constructs and/or mmRNA described herein may include at least one translation enhancing element (TEE). Such TEE which may be included in the 5′UTR and/or 3′UTR include, but are not limited to, those listed in Table 32, including portion and/or fragments thereof. The TEE sequence may include at least 5%, at least 10%, at least 15%, at least 20%, at least 25%, at least 30%, at least 35%, at least 40%, at least 45%, at least 50%, at least 55%, at least 60%, at least 65%, at least 70%, at least 75%, at least 80%, at least 85%, at least 90%, at least 95%, at least 99% or more than 99% of the TEE sequences disclosed in Table 28 and/or the TEE sequence may include a 5-30 nucleotide fragment, a 5-25 nucleotide fragment, a 5-20 nucleotide fragment, a 5-15 nucleotide fragment, a 5-10 nucleotide fragment of the TEE sequences disclosed in Table 32.

TABLE 32
TEE Sequences

| TEE | | |
|---|---|---|
| Identifier | Sequence | SEQ ID NO |
| TEE-001 | MSCSGCNGMWA | 5041 |
| TEE-002 | RNSGAGMGRMR | 5042 |
| TEE-003 | RNSGAGMGRMRRR | 5043 |
| TEE-004 | RMSCSGCNGMWR | 5044 |
| TEE-005 | GCGAGAGAA | — |
| TEE-006 | GGGAGCGAA | — |
| TEE-007 | GCGAGAGGA | — |
| TEE-008 | GCGAGCGGA | — |
| TEE-009 | CGGAGCGAA | — |
| TEE-010 | CGGAGCGGA | — |
| TEE-011 | ACGAGAGGA | — |
| TEE-012 | ACGAGCGGA | — |
| TEE-013 | GACGAGAGGA | 5045 |
| TEE-014 | GACGAGAGAA | 5046 |
| TEE-015 | AGCGAGCG | — |
| TEE-016 | AGGAGAGGA | — |
| TEE-017 | GCCGAGAGA | — |
| TEE-018 | CGAGAGGCA | — |
| TEE-019 | GAGAGGAGC | — |
| TEE-020 | CGCGGCGGA | — |
| TEE-021 | CGCCGCCGC | — |
| TEE-022 | GCGGCTGAA | — |
| TEE-023 | CCGGCTGAA | — |
| TEE-024 | CGCCGCTGAA | 5047 |
| TEE-025 | CGCCGCGGAA | 5048 |
| TEE-026 | CGCCGCCGAA | 5049 |
| TEE-027 | CCCGCGGAA | — |
| TEE-028 | CCCGCCGAA | — |
| TEE-029 | CCCGCTGAA | — |
| TEE-030 | CCCGGCGGA | — |
| TEE-031 | CGCGGCTGA | — |
| TEE-032 | CGGCTGCTA | — |
| TEE-033 | CCCGGCGGA | — |
| TEE-034 | AGCCGCCGCA | 5050 |
| TEE-035 | ACGCCGCCGA | 5051 |
| TEE-036 | GGCATTCATCGT | 5052 |
| TEE-037 | GCATTAGTATCT | 5053 |
| TEE-038 | TCGGTTATTGTT | 5054 |
| TEE-039 | TCCAATTGGGAA | 5055 |
| TEE-040 | ATCTATTGGCCA | 5056 |
| TEE-041 | TTACTGGGTGTT | 5057 |
| TEE-042 | AGGGTGAAGGTC | 5058 |
| TEE-043 | GGTGGGTGTGTC | 5059 |
| TEE-044 | CGCTTCAATGCT | 5060 |
| TEE-045 | TGCTTCAATGCC | 5061 |
| TEE-046 | TGTGTCTTTGCA | 5062 |
| TEE-047 | CACGGGGACAGC | 5063 |
| TEE-048 | AAGCTGTACATG | 5064 |
| TEE-049 | GATGGGGGCACA | 5065 |
| TEE-050 | ATATGTGCCCTT | 5066 |
| TEE-051 | TCCTTCTGGGTC | 5067 |
| TEE-052 | GGTGGGTGTGTC | 5068 |
| TEE-053 | GAATGGATGGGG | 5069 |
| TEE-054 | CAXGTGATATTC | 5070 |
| TEE-055 | AGGAGGGTTTGT | 5071 |
| TEE-056 | TGGGCGAGTGGG | 5072 |
| TEE-057 | CGGCTCACCAGT | 5073 |
| TEE-058 | GGTTTCXATAAC | 5074 |
| TEE-059 | GGTGGGTGTGTC | 5075 |
| TEE-060 | TTACTGGGTGTT | 5076 |
| TEE-061 | AAGTCTTTGGGT | 5077 |
| TEE-062 | CCGGCGGGU | — |
| TEE-063 | CCGGCGGG | — |
| TEE-064 | CCGGCGG | — |
| TEE-065 | CCGGCG | — |
| TEE-066 | CCGGC | — |
| TEE-067 | CGGCGGGU | — |
| TEE-068 | GGGAGACGGCGGCGGTGGCGGCGCGGGCAGAGCAA | 5078 |
| | GGACGCGGCGGATCCCACTCGCACAGCAGCGCACTC | |
| | GGTGCCCCGCGCAGGGTCG | |
| TEE-069 | AAAGAAATGGAATCGAAGAGAATGGAAACAAATGG | 5079 |
| | AATGGAATTGAATGGAATGGAATTGAATGGAATGGG | |
| | AACG | |
| TEE-070 | AAAGAAATGGAATCGAAGAGAATGGAAACAAATGG | 5080 |
| | AATGGAATTGAATGGAATGGAATTGAATGGAATGGG | |
| | AACG | |
| TEE-071 | AGACAGTCAGACAATCACAAAGAAACAAGAATGAA | 5081 |
| | AATGAATGAACAAAACCTTCAAGAAATATGGGATTA | |
| | TGAAGAGGCCAAATGT | |
| TEE-072 | AAAAGGAAATACAAGACAACAAACACAGAAACACA | 5082 |
| | ACCATCGGGCATCATGAAACCTCGTGAAGATAATCA | |
| | TCAGGGT | |
| TEE-073 | AGACCCTAATATCACAGTTAAACGAACTAGAGAAGG | 5083 |
| | AAGAGCAAACAAATTCAAAAGCTAGCGGAAAGCAA | |
| | GAAATAACTAAGACCAG | |
| TEE-074 | AAAGACTTAAACATAAGACCTAAAACCATAAAAACC | 5084 |
| | ACAGAAGAAAACATAGGCAATGCCATTCAGGACATA | |
| | GGCATGGGCAAAGACTTC | |
| TEE-075 | AGCAATAACCAAACAACCTCATTAAAAAGTAGGCAA | 5085 |
| | AGGACATAAACAGACACTTTTCAAAAGAAGACATAC | |
| | ACGTGGCCAACAAACATATG | |
| TEE-076 | AGAAAGAATCAAGAGGAAATGCAAGAAATCCAAAA | 5086 |
| | CACTGTAACAGATATGATGAATAATGAGGTATGCAC | |
| | TCATCAGCAGACTCGACAT | |
| TEE-077 | GCACTAGTCAGATCAAGACAGAAAGTCAACGAACAA | 5087 |
| | AGAACAGACTTAAACTACACTCTAGAACAAATGGAC | |
| | CTA | |
| TEE-078 | AGCAGCCAACAAGCATATGAAATAATGCTCCACAAC | 5088 |
| | ACTCATCATCAGAGAAATGCAAATCAAAACCAAAAT | |
| TEE-079 | AATATACGCAAATCAATAAATGTAATCCAGCATATA | 5089 |
| | AACAGTACTAAAGACAAAAACCACATGATTATCTCA | |
| | ATAGATGCAGAAAAGGCC | |
| TEE-080 | ATGTACACAAATCAATAAATGCAGTCCAGCATATAA | 5090 |
| | ACAGAACCAAACACAAAAACCACATGATTATCTCAA | |
| | TAGATGCAGAAAAGGCCTTT | |
| TEE-081 | TATACCACACAAATGCAAAAGATTATTAGCAACAAT | 5091 |
| | TATCAACAGCAATATGTCAACAAGTTGACAAACCTA | |
| | GAGGACATGGAT | |
| TEE-082 | AAACACACAAAGCAACAAAAGAACGAAGCAACAAA | 5092 |
| | AGCATAGATTTATTGAAATGAAAGTACATTCTACAG | |
| | AGTGGGGGCAGGCT | |
| TEE-083 | GAAATCATCATCAAACGGAATCGAATGGAATCATTG | 5093 |
| | AATGGAATGGAATGGAATCATCATGGAATGGAAACG | |
| TEE-084 | AACAGAATGGAATCAAATCGAATGAAATGGAATGG | 5094 |
| | AATAGAAAGGAATGGAATGAAATGGAATGGAAAGG | |
| | ATTCGAATGGAATGCAATCG | |
| TEE-085 | TACAAAGAACTCAAACAAATCAGCAAGAACAAAAA | 5095 |
| | CAATCCCAACAAAATGTTGGACAAAGACATGAATAG | |
| | ACAATTCTCGAAAGAAGATGTACAAATGGCT | |
| TEE-086 | TGTTGAGAGAAATTAAACAAAGCACAGATAAATGGA | 5096 |
| | AAAACGTGTTCATAGATTGAAAGACTTCATGTTGTAT | |
| | GGTGTC | |
| TEE-087 | AAACGATTGGACAGGAATGGAATCACCATCGAATGG | 5097 |
| | AAACGAATGGAATCTTCGAATGGAATTGAATGAAAT | |
| | TATTGAACGGAATCAAATAGAATCATCATTGAACAG | |
| | AATCAAATTGGATCAT | |
| TEE-088 | AACAATAAACAAACTCCAACTAGACACAATAGTCAA | 5098 |
| | ATTGCTGAAAATGAAATATAAAGGAACAATCTCGAT | |
| | GGTAGCCCAAGGA | |
| TEE-089 | AAATCAATAAATGTAATTCAGCATATAAACAGAACC | 5099 |
| | AAAGACAAAAACCACATGATTATCTCAATAGATGCA | |
| | GAAAAGGCCTTT | |
| TEE-090 | GCTCAAGGAAATAAAATAGGACACAAAGAAATGGA | 5100 |
| | AAAACATTCCATACTCATGGATAGAAAGAATCAATA | |
| | TCATGAAATGGCC | |
| TEE-091 | AACATACGCAAATCAATAAATGTAATCCAGCATATA | 5101 |
| | AACAGAACCAAAGACAAAAACCACATGATTATCTCA | |
| | ATAGATGCAGAAAAGGCC | |
| TEE-092 | AACAATCACTAGTCCTTAAGTAAGAGACAACACCTT | 5102 |
| | TTGTCACACACAGTTTGTCCTAACTTTATCTTGGTAA | |
| | TTGGGGAGACC | |
| TEE-093 | AGAAAACACACAGACAACAAAAAACACAGAACGAC | 5103 |
| | AATGACAAAATGGCCAAGC | |
| TEE-094 | ACACAACAACCAAGAAACAACCCCATTAAGAAGTGG | 5104 |
| | GAAAAATACATGAATAAACACATCTCAAAAGAAGAC | |
| | AAACAAGTGGCTAAC | |
| TEE-095 | ACAGCAGAAAACGAACATCAGAAAATCACTCTACAT | 5105 |
| | GATGCTTAAATACAGAGGGCAAGCAACCCAAGAGA | |
| | AAACACCACTTCCTAAT | |
| TEE-096 | GAATAGAACAGAATGGAATCAAATCGAATGAAATG | 5106 |
| | GAATGGAATAGAAAGGAATGGAATGAAATGGAATG | |
| | GAAAGGATTCGAATGGAATG | |
| TEE-097 | TAAGCAGAGAAAATATCAACACGAAAATAATGCAA | 5107 |
| | GGAGAAAAATACAGAACAATCCAAAATGTGGCC | |
| TEE-098 | GAACAATCAATGGAAGCAGAAACAAATAAACCAAG | 5108 |
| | GTGTGCATCAAGGAATACATTCACGCATGATGGCTG | |
| | TATGAGTAAAATG | |
| TEE-099 | GATCAATAAATGTAATTCATCATATAAACAGAGAAC | 5109 |
| | TAAAGACAAAAACACATGATTATCGCAATACATGCA | |
| | GAAAAGGCC | |
| TEE-100 | GACAAGAGTTCAGAAAGGAAGACTACACAGAAATA | 5110 |
| | CGCATTTTAAAGTCACTGACATGGAGATGACACTTA | |
| | AAACCATGAACATGGATGGG | |
| TEE-101 | AAGCAAAGAAAGAATGAAGCAGCAAAAGAACGAAA | 5111 |
| | GCAGGAATTTATTGAAAACCAAAGTACACTCCACAG | |
| | TATGGGAGCGGACCCGAGCA | |
| TEE-102 | ACCAACATAAGACAAAGAAACATCCAGCAGCTGCCT | 5112 |
| | ATGGCAAAAGATTACAATGTGTCAAACAAGAGGGCA | |
| | ATG | |
| TEE-103 | GGACAAATTGCTAGAAATAAACAAATTACCAAAAAT | 5113 |
| | GATTCAAGTAGAGACAGAGAATCAAAATAGAACTAC | |
| | ACATAAGTGGGCCAAG | |
| TEE-104 | AACATAATCCATCAAATAAACAGAACCAAAGACAAA | 5114 |
| | AACCACATGATTATCTCAATAGATGCAGAAAAGGCC | |
| | TTC | |
| TEE-105 | AAAATCAATATGAAAACAAACACAAGCAGACAAAG | 5115 |
| | AAAATTGGGCAAAAGGTTTGAGCAGACACTTCACCA | |
| | AAGAAGTACAAATGGCAAATCAGCA | |
| TEE-106 | AACCAAATTAGACAAATTGGAAATCATTACACATAA | 5116 |
| | CAAAAGTAATAAACTGTCAGCCTCAGTAGTATTCATT | |
| | GTACATAAACTGGCC | |
| TEE-107 | AAGGAATTTAAGCAAATCAACAAGCAAAACCAAAAT | 5117 |
| | AATCCCATTAAAAAGTGGGTAAAGGACATGAATACA | |
| | CACTTGTCAATAGAGGACATTCAAGTGGCCAAC | |
| TEE-108 | TAACCTGATTTGCCATAATCCACGATACGCTTACAAC | 5118 |
| | AGTGATATACAAGTTACATGAGAAACACAAACATTT | |
| | TGCAAGGAAACTGTGGCCAGATG | |
| TEE-109 | AACTAACACAAGAACAGAAAACCAAACATCACATGT | 5119 |
| | TCTCACTCATAAGCGGGAGCTGAACAATGAGAACAC | |
| | ACGGACACAGGGAGAGGAACATG | |
| TEE-110 | TAAACTGACACAAACACAGACACACAGATACACACA | 5120 |
| | TACATACAGAAATACACATTCACACACAGACCTGGT | |
| | CTTTGGAGCCAGAGATG | |
| TEE-111 | ATCAACAGACAACAGAAACAAATCCACAAAGCACTT | 5121 |
| | AGTTATTAGAACTGTCATACAGACTGTACAACAACC | |
| | ACATTTACCAT | |
| TEE-112 | AAATAAGCCAACGGTCATAAATTGCAAAGCCTTTTA | 5122 |
| | CAATCCAAACATGATGGAAACGATATGCCATTTTGA | |
| | AGGTGATTTGAAAAGCACATGGTTT | |
| TEE-113 | AAACAGTTCAAAAATTATTGCAACAAAATGAGAGAG | 5123 |
| | ATGAGTTTATCTTGCAAACTAATGGATGGTAGCAGT | |
| | GACAGTGGCAAAACGTGGTTTGATTCT | |
| TEE-114 | TAAGCAACTTCAGCAAAGTCTCAGGATACAAAATCA | 5124 |
| | ATGTACAAAAATCACAAGCATTCTTATACACCAACA | |
| | ACAGACAAACAAGAGTGCCAAATCATG | |
| TEE-115 | AGCAAACAAACAAACAAACAAACAAACTATGACAG | 5125 |
| | GAACAAAACGTCACATATCAACATTAACAAAGAATG | |
| | TAAACAGCCTAAATGCTTCACTTAAAAGTTATAGAC | |
| | AGGGGCTGGGCATGGTGGCTCACGCC | |
| TEE-116 | GGAAATAACAGAGAACACAAACAAATGGGAAAACA | 5126 |
| | TTCCATGTTCATGGATAGGAAGAATCAATATTGTGA | |
| | AAATGGCCATACT | |
| TEE-117 | AGCAACTTCAGCAAAGTCTCAGGATACAAAATCAAT | 5127 |
| | GTACAAAAATCACAAGCATTCTTATACACCAATAAC | |
| | AGACAAACAGAGAGCC | |
| TEE-118 | AGATAAGAATAAGGCAAACATAGTAATAGGGAGTTC | 5128 |
| | ATGAATAACACACGGAAAGAGAACTTACAGGGCTGT | |
| | GATCAGGAAACG | |
| TEE-119 | AGGAAATAAAAGAAGACACAAACAAATGGAAGAAC | 5129 |
| | ATTCCATGCTTATGGATAGGGAGAATCAGTATCGTG | |
| | AAAATGGCCATACT | |
| TEE-120 | AACATACGAAAATCAATAAACGTAATCCAGCATATA | 5130 |
| | AACAGAACCAAAGACAAAAACCACATGATTATCTCA | |
| | ATAGATGCAGAAAAGGCCTTT | |
| TEE-121 | AATGGACTCGAATGAAATCATCATCAAACGGAATCG | 5131 |
| | AATGGAATCATTGAATGGAATGGAATGGAATCATCA | |
| | TGGAATGGAAACG | |
| TEE-122 | AAGATTTAAACATAAGACCTAAAACGACAAAAATCC | 5132 |
| | TAGGAGAAAACCTAAGCAATACCATTCAGGACATAG | |
| | GCATGGGCAAAGACTTCATG | |
| TEE-123 | TAATGAGAAGACACAGACAACACAAAGAATCACAG | 5133 |
| | AAACATGACACAGGTGACAAGAACAGGCAAGGACC | |
| | TGCAGTGCACAGGAGCC | |
| TEE-124 | TAAACGTTAGACCTAAAACCATAAAAACCCTAGAAG | 5134 |
| | AAAACCTAGGCATTACCATTCAGGACATAGGCATGG | |
| | GCAAGGAC | |
| TEE-125 | GAATTGAATTGAATGGAATGGAATGCAATGGAATCT | 5135 |
| | AATGAAACGGAAAGGAAAGGAATGGAATGGAATGG | |
| | AATG | |
| TEE-126 | GTAATGGAATGGAATGGAAAGGAATCGAAACGAAA | 5136 |
| | GGAATGGAGACAGATGGAATGGAATGGAACAGAG | |
| TEE-127 | AGAGAAATGCAAATCAAAACCACAATGGAATACCAT | 5137 |
| | CTCACGCCAGTCAGAATGGCAATTATTAAAAAATCA | |
| | CAACAATTAATGATGGCAAGGCTGTGG | |
| TEE-128 | AACATACACAAATCAATAAACGTAATCCAGCTTATA | 5138 |
| | AACAGAACCAAAGACAAAAACCACATGATTATCTCA | |
| | ATAGATGCGGAAAAGGCC | |
| TEE-129 | TAAACAGAACCAAAGACAAAAATCACATGATTATCT | 5139 |
| | CAATAGATGCAGAAAAGGCC | |
| TEE-130 | AATGGAATGCAATCGAATGGAATGGAATCGAACGGA | 5140 |
| | ATGGAATAAAATGGAAGAAAACTGGCAAGAAATGG | |
| | AATCG | |
| TEE-131 | AGATAAAAAGAACAGCAGCCAAAATGACAAAAGCA | 5141 |
| | AAAAGCAAAATCGTGTTAGAGCCAGGTGTGGTGATG | |
| | TGTGCT | |
| TEE-132 | AGGAAAGTTTTCAATATGAGAAAGATACAAACCAAC | 5142 |
| | AGAATAAGCAAACTGGATAAACAGAAAATACAGAG | |
| | AGAGCCAAGG | |
| TEE-133 | GCAATCTCAGGATACAAAATCAATGTGCAAAAATCA | 5143 |
| | CAAGCATTCTCATACACCAATAACAGACAAACAGAG | |
| | CCAAATCATG | |
| TEE-134 | AGCATTCATATCTTGCAGTGTTGGGAAAGAGTGAGA | 5144 |
| | GGTTGTGATGTCAAGAAGGATAGGTCAGAAGTGGAA | |
| | GGTATGGGGGATTGTGCCTGCTGTCATGGCT | |
| TEE-135 | AGCAACTTCAGCAAAGTCTCAGGATACAAAATCAAT | 5145 |
| | GTGCAAAAATCACAAGCATTCTTATACACCAATAAC | |
| | AGACAAACAGAGAGCC | |
| TEE-136 | AGCAACTTCAGCAAAGTCTCAGGATACAAAATCAAT | 5146 |
| | GTGCAAAAATCACAAGCATTCTTATACACCAACAAC | |
| | AGACAAACAGAGAGCC | |
| TEE-137 | TAAGCCGATAAGCAACTTCAGCAAAGTCTCAGGAGA | 5147 |
| | CAAAATCAATGTGCAAAAAATCACAAGCATTCTTAT | |
| | ACACTAATAACAGACAAACAGAGAGCCAAATCATG | |
| TEE-138 | AACGTGACATACATACAAAAAGTTTTTAGAGCAAGT | 5148 |
| | GAAATTTTAGCTGCTATATGTTAATTGGTGGTAATCCC | |
| TEE-139 | TACGCAAATCGATAAATGTAATCCAGCATATAAACA | 5149 |
| | GAACCAAAGACAAAAACCACATGATTATCTCAATAG | |
| | ATGCAGAAAAGGCC | |
| TEE-140 | GCAATCGAATGGAATGGAATCGAACGGAATGGAATA | 5150 |
| | AAATGGAAGAAAACTGGCAAGAAATGGAATCG | |
| TEE-141 | TTGAATCGAATGGAATCGAATGGATTGGAAAGGAAT | 5151 |
| | AGAATGGAATGGAATGGAATTGACTCAAATGGAATG | |
| TEE-142 | TAAAGAAAAACAAACAAACAGAAATCAATGAAAAT | 5152 |
| | CCCATTCAAAGGTCAGCAACCTCAAAGACTGAAGGT | |
| | AGATAAGCCCACAAGGATG | |
| TEE-143 | GTCATATTTGGGATTTATCATCTGTTTCTATTGTTGTT | 5153 |
| | GTTTTAGTACACACAAAGCCACAATAAATATTCTAG | |
| | GCT | |
| TEE-144 | AAAAGTACAGAAGACAACAAAAAATGAGAGAGAGA | 5154 |
| | AAGATAACAGACTATAGCAGCATTGGTGATCAGAGC | |
| | CACCAG | |
| TEE-145 | AACCCACAAAGACAACAGAAGAAAAGACAACAGTA | 5155 |
| | GACAAGGATGTCAACCACATTTTGGAAGAGACAAGT | |
| | AATCAAACACATGGCA | |
| TEE-146 | AAAGACCGAAACAACAACAGAAACAGAAACAAACA | 5156 |
| | ACAATAAGAAAAAATGTTAAGCAAAACAAATGATTG | |
| | CACAACTTACATGATTACTGAGTGTTCTAATGGT | |
| TEE-147 | AATCAGTAAACGTAATACAGCATATAAACAGAACCA | 5157 |
| | AAGACAAAAACCACATGATTATCTCAATAGATGCAG | |
| | AAAAGGCC | |
| TEE-148 | AAGCAACTTCAGCAAAGTCTCAGGACACAAAATCAA | 5158 |
| | TATGCGAAAATCACAAGCATTCCTATACACCAATAA | |
| | TAGACAAACAGAGAGCCAAATCATG | |
| TEE-149 | AGCAACTTCAGCAAAATCTCAGGATACAAAATCAAT | 5159 |
| | GTACAAAAATCACAAGCATTCTTATACACCAACAAC | |
| | AGACAAACAGAGAGCC | |
| TEE-150 | TAATGCAAACTAAAACGACAATGAGATATCAATACA | 5160 |
| | TAACTACCAGAAAGGCTAACAAAAAAACAGTCATAA | |
| | CACACCAAAGGCTGATGAGTGAGGATGTGCAG | |
| TEE-151 | AGCAACTTCAGCAAAGTCTCAGGATACAAAATCGAT | 5161 |
| | GTGCAAAAATCACAAGCATTCTTATACACCAATAAC | |
| | AGGCAAACAGAGAGCC | |
| TEE-152 | GATATATAAACAAGAAAACAACTAATCACAACTCAA | 5162 |
| | TATCAAAGTGCAATGATGGTGCAAAATGCAAGTATG | |
| | GTGGGGACAGAGAAAGGATGC | |
| TEE-153 | AAGACAGAACACTGAAACTCAACAGAGAAGTAACA | 5163 |
| | AGAACACCTAAGACAAGGAAGGAGAGGGAAGGCAG | |
| | GCAG | |
| TEE-154 | TAAGACACATAGAAAACATAAAGCAAAATGGCAGA | 5164 |
| | TGTAAATGCAACCTATCAATCAAAACATTACGAATG | |
| | GCTT | |
| TEE-155 | TGAAACAAATGATAATGAAAATACAACATACCAAAC | 5165 |
| | ATACGAGATACAGTAAAAGCAGTACTAAGATGCAAG | |
| | TATATATTGCTACAAGTGCCTAC | |
| TEE-156 | AATGTAATCCAGCATATAAACAGAGCCAAAGACAAA | 5166 |
| | AACCACATGATTATCTCAATAGATGCAGAAAAAGCC | |
| | TTTGACAAAATTCAACAACCCTTCATGCTAAAAACTC | |
| | TCAATAAATTAGGTATTGATGGGACG | |
| TEE-157 | ACAAAATTGATAGACCACTAGCAAGACTAATAAAGA | 5167 |
| | AGAAAAGAGAGAAGAATCATTACCATTCAGGACATA | |
| | GGCATGGGCAAGGAC | |
| TEE-158 | AAGGATTCGAATGGAATGCAATCGAATGGAATGGAA | 5168 |
| | TCGAACGGAATGGAATAAAATGGAAGAAAACTGGC | |
| | AAGAAATGGAATCG | |
| TEE-159 | GATCATCAGAGAAACAGAGAAATGCAAATTAAAACC | 5169 |
| | ACAATGAGATACTATCTCCACACAAGTCAGAATGGC | |
| | TAT | |
| TEE-160 | ATCAAAAGAAAAGCAACCTAACAAATACGGGAAGA | 5170 |
| | ATATTTGAATAGACATTTCACAGGAAAAGATATATG | |
| | AATGGCCAAAAAGCAAATGAAAAG | |
| TEE-161 | AACAGCAATGACAATGATCAGTAACAACAAGACTTT | 5171 |
| | TAACTTTGAAAAAATCAGGACC | |
| TEE-162 | AAGAGCCTGAATAGCTAAAGTGATCATAAGCAAAAA | 5172 |
| | GAACAAAGTCGGAAGCATCACATTACCTGACTTCAA | |
| | ACTATACTCAAAGGCTATG | |
| TEE-163 | ACTCAGGAAAAATAACGAATCCAACTCACAGGAGAA | 5173 |
| | AGAAGTACAAACCAGAAACCAATTTCAAATTACAAG | |
| | GACCAGAATACTCATGTTGGCTGGCCAGT | |
| TEE-164 | TTGACCAGAACACATTACACAATGCTAATCAACTGC | 5174 |
| | AAAGGAGAATATGAACAGAGAGGAGGACATGGATA | |
| | TTTTGTG | |
| TEE-165 | AACATATGGAAAAAAACTCAACATCACTGATCATTA | 5175 |
| | GAGAAATGCAAATCAAAACCACAATGAGATACCATC | |
| | TCACGCCAGTCAGAATGGCG | |
| TEE-166 | AGCAACTTCAGCAAAGACTCAGGATACAAAATCAAT | 5176 |
| | GTGCAAAAATCACAAGCATTCTTATACACCAATAAC | |
| | AGACAGAGAGCCAAAT | |
| TEE-167 | TGGGATATGGGTGAAAGAACAAGTTTGCAGAAAAGA | 5177 |
| | TACAGTGAATTATGGACCATGAGTTCGGGAAAGAAG | |
| | GGTAGGACTGCG | |
| TEE-168 | AGCAGTGCAAGAACAACATAACATACAAGTAAACA | 5178 |
| | AACACATGGGGCCAGGTAATAAAAAGTCAGGCTCAA | |
| | GAGGTCAG | |
| TEE-169 | AAGGAAAAGTAAAAGGAACTTAACACCTTCAAGAA | 5179 |
| | AAGACAGACAAATAACAAAACAGCAGTTTGATAGA | |
| | ATGAGATATCAGGGGATGGCA | |
| TEE-170 | GCTAGTTCAACATATGCAAATCAATAAACGTAATCC | 5180 |
| | ATCACATAAACAGAACCAATGACAAAAACCACGATT | |
| | ATCTCAATAGATGCAGAAAAGGCC | |
| TEE-171 | AACATCACTGATCATTAGAAACACACAAATCAAAAC | 5181 |
| | CACAATAAGATACCATCTAACACCAGTCACAATGGC | |
| | TATT | |
| TEE-172 | AGAGCATCCACAAGGCCCAATTCAAAGAATCTGAAA | 5182 |
| | TAATGTATTGTTACTGCAACAGTTGTGAGTACCAGTG | |
| | GCATCAG | |
| TEE-173 | GGAATAACAACAACAACAACCAAAAGACATATAGA | 5183 |
| | AAACAAACAGCACGATGGCAGATGTAAAGCCTACC | |
| TEE-174 | AAACGCAGAAACAAATCAACGAAAGAACGAAGCAA | 5184 |
| | TGAAAGACAAAGCAACAAAAGAATGGAGTAAGAAA | |
| | GCACACTCCACAAAGTGGAAGCAGGCTGGGACA | |
| TEE-175 | AGCAACTTCAGCAAAGTCTCAGGATACAAAATCAAT | 5185 |
| | GTGCAAAAATCACAAGCATTCCTATACACCAACAAC | |
| | AGACAAACAGAGAGCC | |
| TEE-176 | AGCAACTTCAGCAAAGTCTCAGGATACAAAATCAAT | 5186 |
| | GGGAAAAAATCACAAGCATTCCTATACATCAATAAC | |
| | AGACAAACAGAGAGCC | |
| TEE-177 | ACACATTTCAAGGAAGGAAACAAGAACAGACAGAA | 5187 |
| | ACACAACATACTTCATGAAACCACATTTTAGCATCCT | |
| | GGCCGAGTATTCATCA | |
| TEE-178 | AGCAACTTCAGCAAAGTCTCAGGACACAAAATCAAT | 5188 |
| | GTGCAAAAATCACAAGCATTCTTATACACCAATAAC | |
| | AGACAAACAGAGAGCC | |
| TEE-179 | TATTTTACCAGATTATTCAAGCAATATATAGACAGCT | 5189 |
| | TAAAGCATACAAGAAGACATGTATAGATTTACATGC | |
| | AAACACTGCACCACTTTACATAAGGGACTTGAGCAC | |
| TEE-180 | CCCAACTTCAAATTATACTACAAGGCTACAGTAATC | 5190 |
| | AAAAAAGCATAGTACTATTACAAAAACAGACACACA | |
| | GGCCAATGGAATACAAT | |
| TEE-181 | AGAAAGGATTCGAATGGAATGAAAAAGAATTGAAT | 5191 |
| | GGAATAGAACAGAATGGAATCAAATCGAATGAAAT | |
| | GGAATGGAATAGAAAGGAATGGAATG | |
| TEE-182 | GTTTACAGTCAAGTGTACAAACAGAATATAAGCAAA | 5192 |
| | CAAAAGAGAACATATACTTACAAACTATGCTAAGTG | |
| | CCATGAAGGAAAAG | |
| TEE-183 | AAGAGTATTGAAGTTGACATATCTAGACTGATCAAG | 5193 |
| | AACAAAGACAAAAGGTACAGATTATCAAGAAAATG | |
| | AGCGGGCAAAGCAAGATGGCC | |
| TEE-184 | AGTAGAATTGCAATTGCAAATTTCACACATATACTCA | 5194 |
| | CACACAAGTACACACATCCACTTTTACAACTAAAAA | |
| | AACTAGCACCCAGGACAGGTGCAGTGGCT | |
| TEE-185 | TGAATGCTATAGAGCAGTAAAAACAAATAAATGAAC | 5195 |
| | TACATTACAGCTACTTACAACCATATGAAAGAATAT | |
| | AACCATAACAATGATGAGTGGACAAAAGCTAAGTGT | |
| | GAAAGAATGCATAGTGCTACAGCAGCCAACATTTAC | |
| | AGC | |
| TEE-186 | GAATGGAATCAAATAGAATGGAATCGAAACAAATG | 5196 |
| | GAATGGAATGGAATGGGAGCTGAGATTGTGTCACTG | |
| | CAC | |
| TEE-187 | TAAAAGTGTGCTCAACATCATTGATCATCAGAGAAA | 5197 |
| | TGCAAATCAAAACTACAATGAGATATCATCTCATCC | |
| | CAGTCAAAGTGGCT | |
| TEE-188 | TCAGACCATAGCAGATAACATGCACATTAGCAATAC | 5198 |
| | GATTGCCATGACAGAGTGGTTGGTG | |
| TEE-189 | ACAAACAATCCAATTCGAAAATGGGCAAGATATTTC | 5199 |
| | ACCAAAGACATGAGCTGATATTTCAC | |
| TEE-190 | AGGAAAAACAACAACAACAACAGGAAAACAACCTC | 5200 |
| | AGTATGAAGACAAGTACATTGATTTATTCAACATTTA | |
| | CTGATCACTTTTCAGGTGGTAGGCAG | |
| TEE-191 | AACAAAACAAAAACCCAACTCAATAACAAGAAGAC | 5201 |
| | AAACAACCCAATTTAAAATGAGCAAAGAACTTGATA | |
| | AACATGTCTCCAAAGAAGATACGGCCAAAGAGCAC | |
| TEE-192 | ATACAACTAAAGCAAATATAAGCAACTAAAGCAACA | 5202 |
| | GTACAACTAAAGCAAAACAGAACAAGACTGCCAGG | |
| | GCCTAGAAAAGCCAAGAAC | |
| TEE-193 | AACAACAACAACAACAGGAAAACAACCTCAGTATG | 5203 |
| | AAGACAAGTACATTGATTTATTCAACATTTACTGATC | |
| | ACTTTTCAGGTGGTAGGCAGACC | |
| TEE-194 | AGAGAGTATTCATCATGAGGAGTATTACTGGACAAA | 5204 |
| | TAATTCACAAACGAACAAACCAAAGCGATCATCTTT | |
| | GTACTGGCTGGCTA | |
| TEE-195 | AGTAAATCACCATAAAGAAGGTAAGAGTTCATTCAC | 5205 |
| | AAAAACAACAAACTGAAGAATCAGGCCATAGTA | |
| TEE-196 | AAAATAGAATGAAAGAGAATCAAATGGAATTGAATC | 5206 |
| | GAATGGAATCGAATGGATTGGAAAGGAATAGAATG | |
| | GAATGGAATGGAATG | |
| TEE-197 | AAAAGATGCAAAAGTAGCAAATGCAATGTTAAAACA | 5207 |
| | AGCAAAGAAAGAATCAGGTGGACCACATAGTGCAGT | |
| | GCTTCTC | |
| TEE-198 | TTCACAGCAGCATTACGCACAATAGCCAGAAGGTGG | 5208 |
| | GAACAGACAAAATGCCTTTTGATGGG | |
| TEE-199 | CCATAACACAATTAAAAACAACCTAAATGTCTAATA | 5209 |
| | GAAGAACACTGTTCAGACCGGGCATGGTGGCTTATA | |
| | CC | |
| TEE-200 | TGGATTTCAGATATTTAACACAAAATAGTCAAAGCA | 5210 |
| | GATAAATACTAGCAACTTATTTTTAATGGGTAACATC | |
| | ATATGTTCGTGCCTT | |
| TEE-201 | ATCATTGAATGCAATCACATGGAATCATCACAGAAT | 5211 |
| | GGAATCGTACGGAATCATCATCGAATGGAATTGAAT | |
| | GGAATCATCAATTGGACTCGAATGGAAACATCAAAT | |
| | GGAATCGATTGGAAGTGTCGAATGGACTCG | |
| TEE-202 | AGAAACAGCCAGAAAACAATTATTACCTACAGCATT | 5212 |
| | AAAACTATTCAAATGACAGCATATTTTTCAGCAGAA | |
| | ATCATGAAGGCCAGAAGGACGTGTCAT | |
| TEE-203 | AAAATGATCATGAGAAAATTCAGCAACAAAACCATG | 5213 |
| | AAATTGCAAAGATATTACTTTTGGGATGGAACAGAG | |
| | CTGGAAGGCAAAGAG | |
| TEE-204 | AACCACTGCTCAAGGAAATAAGAGAGAACACAAAC | 5214 |
| | AAATGAAAAAACATTCCATGCTCATGGATAGGAAGA | |
| | ATCAG | |
| TEE-205 | TACTCTCAGAAGGGAAGCAGATATTCAGCATAAATC | 5215 |
| | ATATTGTTTGTACAAAGAGTCTGGGCATGGTGAATG | |
| | ACACT | |
| TEE-206 | TATAGTTGAATGAACACACATACACACACACATGCC | 5216 |
| | ACAAAACAAAAACAAAGTTATCCTCACACACAGGAT | |
| | AGAAACCAAACCAAATCCCAACACATGGCAAGATGAT | |
| TEE-207 | GCTCAAAGAAATCAGAAATGACACAAGCAAATGGA | 5217 |
| | AAAACATGCCATGTTCATGAATATGAAGAATCAATA | |
| | TTGTTAAAATGGCCATACTGCTCA | |
| TEE-208 | GGATACAAAATCAATGTACAAAAATCACAAGCATTC | 5218 |
| | TTATACACCAATAACAGACAAACAGAGAGCC | |
| TEE-209 | AGCAACTTCAGCAAAGTCTCAGGATACAAAATCAAT | 5219 |
| | GTACAAAAATCACAAGCATTCTTATACACCAACAAC | |
| | AGACAAACAGAGAGCC | |
| TEE-210 | AGGAGAATAGCAGTAGAATGACAAAATTAGATTTTC | 5220 |
| | ACATGAAACTTGATGACAGTGTAGGAAATGGACTGA | |
| | AAGGACAAGAC | |
| TEE-211 | AGCAACTTCAGCAAAGTCTCGGGATACAAAATCAAT | 5221 |
| | GTGCAAAAATCACAAGCATTCCTATACACCAATAAC | |
| | AGGCAAACAGAGAGCC | |
| TEE-212 | AAGTTCAAACATCAGTATTAACCTTGAACATCAATG | 5222 |
| | GCCTACATGCATCACTTAAAACATACAGACAGGCAA | |
| | ATTGGGTTAAGAAAACAAACAAGCAAACAAAACAT | |
| | GTTCCAAACATTTGTTGGCTAT | |
| TEE-213 | AAGAAACAATCAAAAGGAAGTGCTAGAAATAAAAC | 5223 |
| | ACACTGTAATAGAAAAGAAGAATGCCTTATGGGCTT | |
| | ATCAATAGACTAGACATGGCCAGG | |
| TEE-214 | AAAGAAAGACAGAGAACAAACGTAATTCAAGATGA | 5224 |
| | CTGATTACATATCCAAGAACATTAGATGGTCAAAGA | |
| | CTTTAAGAAGGAATACATTCAAAGGCAAAAAGTCAC | |
| | TTACTGATTTTGGTGGAGTTTGCCACATGGAC | |
| TEE-215 | AGCAACTTCAGCAAAGTTTCAGGATACAAAATCAAT | 5225 |
| | GTGCAAAAATCACAAGCATTCTTATACACCAACAAC | |
| | AGACAAACAGAGAGCC | |
| TEE-216 | AGAATCAAATGGAATTGAATCGAATGGAATCGAATG | 5226 |
| | GATTGGAAAGGAATAGAATGGAATGGAATGGAATG | |
| TEE-217 | AAACAGAACCACAGATATCTGTAAAGGATTACACTA | 5227 |
| | TAGTATTCAACAGAGTATGGAACAGAGTATAGTATT | |
| | CAACAGAGTATGCAAAGAAACTAAGGCCAGAAAG | |
| TEE-218 | AAAAAATGTTCAACATCACTAGTCAGCAGAGAAATG | 5228 |
| | CAAATCAAAATCACAATGAGATAACTTCTCACACCA | |
| | GACAGCATGGC | |
| TEE-219 | GAATCCATGTTCATAGCACAACAACCAAACAGAAGA | 5229 |
| | AATCACTGTGAAATAAGAAACAAAGCAAAACACAG | |
| | ATGTCGACACATGGCA | |
| TEE-220 | AGGATACAAAATCAAAGTGCAAAAATCACAAGCATT | 5230 |
| | CTTATACACCAATAACAGACAAACAGAGAGCC | |
| TEE-221 | AACAGATTTAAACAAACCAACAAGCAAAAAACGAA | 5231 |
| | CAACTCCATTCAAACATGGACAAAAGACACGAACAG | |
| | ACACTTTTCAAAGAAGACATACATGTGGCC | |
| TEE-222 | AAAGACAATATACAAATGGCCAATAAGCACATGAAA | 5232 |
| | AGACGCTCAACATCCTTAGTCGTTAAGGCAATGCAA | |
| | ATCAAAACCACAATG | |
| TEE-223 | TAAACAACGAGAACACATGAACACAAAGAGGGGAA | 5233 |
| | CAACAGACACCAAGACCTTCTTGAGGGTGGAGGATG | |
| | GGAGGAGGGAG | |
| TEE-224 | GGTTCAACTTACAATATTTTGACTTGACAACAGTGCA | 5234 |
| | AAAGCAATACACGATTAGTAGAAACACACTTCCAAT | |
| | GCCCATAGGACCATTCTGC | |
| TEE-225 | AGCAACTTCAGCAAAGTCTCAGGATACAAAATCAAT | 5235 |
| | GAGCAAAAATCACAAGCATTCTTACACACCAATAAC | |
| | AGACAAACAGAGAGCC | |
| TEE-226 | AATCCAGCATATAAACAGAACCAAAGACAAAAACC | 5236 |
| | ACATGATTATCTCAATAGATGCAGAAAAGGCC | |
| TEE-227 | TGAAAATACAAATGACCATGCAAGTAATTCCGCAGG | 5237 |
| | GAGAGAGCGGATATGAACAAACAGAAGAAATCAGA | |
| | TGGGATAGTGCTGGCGGGAAGTCA | |
| TEE-228 | GCAAATGATTATAAGTGCTGTTATAGAAACATTCAA | 5238 |
| | AGACCAGAAAAGGACCACAATGGCTGACCAC | |
| TEE-229 | AGTCAATAACAAGAAGACAAACAACCCAATTACAAA | 5239 |
| | ATGGGATATGAATTTAATAGATGTTACTCCAAGGAA | |
| | GATACACAAATGGCCAAC | |
| TEE-230 | ATGGTTAAAACTCAACAATGAAAACACAAACAGCGC | 5240 |
| | AATTTAAAAATGGGCAAAATGACAGGCCAGACCCAG | |
| | TGGCTCATGCG | |
| TEE-231 | TAACTACTCACAGAACTCAACAAAACACTATACATG | 5241 |
| | CATTTACCAGTTTATTATAAAGATACAAGTCAGGAA | |
| | CAGCCAAATGGAAGAAATGTAAATGGCAAG | |
| TEE-232 | AACAGACCATAAATAAACACAGAAGACACACGAGT | 5242 |
| | GTAAAGTCAGTGCCCCGCTGCGAATTAAATCGGGGT | |
| | GATGTGATGGCGAGTGAGTGGGTAGTT | |
| TEE-233 | GAATAGAATAGAATGGAATCATCGAATGGAATCGAA | 5243 |
| | TGGAATCATCATGATATGGAATTGAGTGGAATC | |
| TEE-234 | GGAATCTATAATACAGCTGTTTATAGCCAAGCACTA | 5244 |
| | AATCATATGATACAGAAAACAAATGCAGATGGTTTG | |
| | AAGGGTGGG | |
| TEE-235 | AAGATAGAGTTGAAACAGTGGACAATTAAAGAGTAA | 5245 |
| | TTTGGAAGAATGGTGAAATTACAGCCATGCTTTGAA | |
| | TCAGGCGGGTTCACTGGC | |
| TEE-236 | TGAAAAGAAGAATGACCATAAGCAAGCAGATGAAA | 5246 |
| | AACAAAACAGAATTTTTACAGACGTCTTGGACTGAT | |
| | ATCTTGGGC | |
| TEE-237 | AGGAATCTATAATACAGCTGTTTATAGCCAAGCACT | 5247 |
| | AAATCATATGATACAGAAAACAAATGCAGATGGTTT | |
| | GAAGGGTGGG | |
| TEE-238 | AGGAAAAGAAAGAAATAGAAAATGCGAAATGGTAA | 5248 |
| | GAAAAAACAGCATAATAAACATTTGTATGGTGTTGA | |
| | TGGACAATGCATT | |
| TEE-239 | TAACAGTACCAAAAAACAGTCATAATCTTCAAGAGC | 5249 |
| | TTAAATTTAGCATGAAAGGAAGACATTCATCAAAGA | |
| | ATCACACAAAGGAATGTAAAATTAAATGGAGATTAG | |
| | TGCCAGGAAAGAGC | |
| TEE-240 | GCAAAACACAAACAACGCCATAAAAAACTGGGCAA | 5250 |
| | AGGATATGAACAGACATTTTTCAAAACAAAACATAC | |
| | TTATGGCCAAC | |
| TEE-241 | AACAAAATTGAACAACATGCAAAGAAACATAAACG | 5251 |
| | AAGCAATGAAAGTGTGCAGATCCACTGAAATGAAAG | |
| | TGCTGTCCAGAGTGGGAGCCAGCTCGAGA | |
| TEE-242 | GAATGGAATCAACATCAAACGGAATCAAACGGAATT | 5252 |
| | ATCGAATGGAATCGAAGAGAATCATCGAATGGCCAC | |
| | GAATGGAATCATCTAATGGAATGGAATGGAATAATC | |
| | CATGG | |
| TEE-243 | TACAAGAAAATCACAGTAACATTTATAAAACACAGA | 5253 |
| | AGTGTGAACACACAGCTATTGACCTTGAAAACAGTG | |
| | AAAGAGGGTCAGCTGTAGAACTAAGACATAAGCAA | |
| | AGTTTTTCAATCAAGAATACATGGGTGGCC | |
| TEE-244 | AAGAATTGGACAAAACACACAAACAAAGCAAGGAA | 5254 |
| | GGAATGAAAGGATTTGTTGAAAATGAAAGTACACTC | |
| | CACAGTGTGGGAGCAG | |
| TEE-245 | ACAGTTAACAAAAACCGAACAATCTAATTACGAAAT | 5255 |
| | GAACAAAAGATATGAACAGACATTTCACCCGAGAGT | |
| | ATACAGGGGCCAGGCATGGT | |
| TEE-246 | AAACGCACAAACAAAGCAAGGAAAGAATGAAGCAA | 5256 |
| | CAAAAGCAGAGATTTATTGAAAATGAAAAATACACT | |
| | CCACAGGGTGGG | |
| TEE-247 | CACCATGAGTCATTAGGTAAATGCAAATCAAAACCA | 5257 |
| | CAATGAAATACTTCACACCCATGAAGATGGCTATAA | |
| | TAAAAAAACAGACA | |
| TEE-248 | AGCAACTTCAGCAAAGTCTCAGGAGACAAAATCAAT | 5258 |
| | GTACAAAAATCACAAGCATTCTTATACACCAATAAC | |
| | AGACAAACAGAGAGCC | |
| TEE-249 | TGACATGCAAGAAATAAGGAAGTGCAAAAACAAAC | 5259 |
| | AAACAAACAACAACAACAACAACAACAACAACAAC | |
| | AAAAAACAGTCCCAAAAGGATGGGCAG | |
| TEE-250 | AGACTTGAAAAGCACAGACAACGAAAGCAAAAATG | 5260 |
| | GACAAATGGAATCACATCAAGCTAAAAGGTTTTGCA | |
| | TGGCAAAGG | |
| TEE-251 | GCAAAAGAAACAATCAGTAGAGTAAACAGACAACT | 5261 |
| | CATAGAATGCAAGAAAATCATCGCAATCTGTACATC | |
| | CAACAAAGGGCT | |
| TEE-252 | ACAAAATCAAACTAACCTCGATAAGAATGCAAGTGA | 5262 |
| | ATCAAAATGAGTTTCAAGGGGTTGTGGCTAGTACAC | |
| | GCTTTCTACAGCTG | |
| TEE-253 | ACAAACCACTGCTCAAGGAAATAAGGACACAAACA | 5263 |
| | AATGGAACAACATTCCGTGCTCATGGATAGGAAGAA | |
| | TCAATATCGTGAAAATGGCCATACT | |
| TEE-254 | GAACGATTTATCACTGAAAATTAATACTCATGCAAG | 5264 |
| | TAGTAAACGAATGTAATGACCATGATAAGGAGACGG | |
| | ACGGTGGTGATAGT | |
| TEE-255 | AGCAGAAGAAATAACTGAAATCAGAGTGAAACTGA | 5265 |
| | ATCAAATTGAGATGCAAAAATACATACGAAATGGCC | |
| | AG | |
| TEE-256 | TGAATAGACACACAGACCAATGGAACAGAATAGAG | 5266 |
| | AACACAGAATAAATCTGCACACTTATAGCCAGCTGA | |
| | TTTTTGACAAATTTGCCAAG | |
| TEE-257 | AGCAACTTCAGCAGTCTCAGTATACAAAAACAATGT | 5267 |
| | GCAAAAATCACAAGCATTCCTATATGCCAATAACAG | |
| | ACAAACAGAGAGCC | |
| TEE-258 | ACCAATCAAGAAAACAATGCAACCCACAGAGAATG | 5268 |
| | GACAAAAGCAAGGCAGGACAATGGCT | |
| TEE-259 | GCCACAATTTTGAAACAACCATAATAATGAGAATAC | 5269 |
| | ACAAGACAACTCCAATAATGTGGGAAGACAAACTTT | |
| | GCAATTCACATCATGGC | |
| TEE-260 | GAAAATGAACAATATGAACAAACAAACAAAATTACT | 5270 |
| | ACCCTTACGAAAGTACGTGCATTCTAGTATGGTGAC | |
| | AAAAAGGAAA | |
| TEE-261 | TATGCAAATCAATAAACATAATCCATCACATAAACA | 5271 |
| | GAAACAAAGACAAAATGACATGATTATCTCAATAGA | |
| | TGCAGAAAAGGCC | |
| TEE-262 | CACCCATCTGTAGGACCAGGAAGCCTGATGTGGGAG | 5272 |
| | AGAACAGCAGGCTAAATCCAGGGTTGGTCTCTACAG | |
| | CAGAGGGAATCACAAGCCTGTTAGCAAGTGAAGAAC | |
| | CAACACTGGCAAGAGTGTGAAGGCC | |
| TEE-263 | AGGATACAAAATCAATGTACAAAAATCACAAACATT | 5273 |
| | CTTATACACCAACAACAGACAAACAGAGAGCCAAAT | |
| | CATGGGTG | |
| TEE-264 | AGGAAAATGCAAATCAGAACGACTATAACACACCAT | 5274 |
| | CTCAAACTCGTTAGGATGGCTATTATCAAAAAGTCA | |
| | AGAGATAACAAATGTGGGCAAGGG | |
| TEE-265 | GTAACAAAACAGACTCATAGACCAATAGAACAGAAT | 5275 |
| | AGAGAATTCAGAAATAAGACTGCACTTCTATGACCA | |
| | TGTGATCTTAGACAAACCT | |
| TEE-266 | AAAGGAAAACTACAAAACACTGCTGAAAGAAATCAT | 5276 |
| | TGACAACACAAACAAATGGAAACACATCCCAAGATC | |
| | ATGGGTGGGTGGAATCAAT | |
| TEE-267 | ACACACATACCAACAGAACATGACAAAAGAACAAA | 5277 |
| | ACCAGCCGCATGCATACTCGATGGAGACAAAGGTAA | |
| | CACTGCAGAATGGTGAAGGAAGAACAGTCATTTTAA | |
| | TGACAGTGTTGGCT | |
| TEE-268 | AACTAAGACAACAGATTGATTTACACTACTATTTTCA | 5278 |
| | CACAGCCAAAAATATCACTATGGCAATCGTCAAAAG | |
| | GTCAATTCAAAGATGGGACAGT | |
| TEE-269 | GATCAGCTTAGAATACAATGGAACAGAACAGATTAG | 5279 |
| | AACAATGTGATTTTATTAGGGGCCACAGCACTGTTG | |
| | ACTCAAGTACAAGTTCTGACTCATGTAGAACTAACA | |
| | CTTTT | |
| TEE-270 | GAATGGAATCAAATCGAATGAAATGGAATGGAATAG | 5280 |
| | AAAGGAATGGAATGAAATGGAATGGAAAGGATTCG | |
| | AAT | |
| TEE-271 | AAATGAACAAAACTAGAGGAATGACATTACCTGACT | 5281 |
| | TCAAATTATACTACAGAGCTATAGTAACCAAAACAG | |
| | CATGGTACAGGCAT | |
| TEE-272 | GGACAACATACACAAATCAGTCAAGATACATCATTT | 5282 |
| | CAACAGAATGAAAGACAAAAACCATTTGATCACTTC | |
| | AATCGATGATGAAAAAGCA | |
| TEE-273 | AACTTCAGCAAATTCTCAGGATACAAAATCAATGTG | 5283 |
| | CAAAAACCACAAGCATTCCTATACACCAATAATAGA | |
| | CAGTGAGCCAAAT | |
| TEE-274 | TATGACTTTCACAAATTACAGAAAAAGACACCCATT | 5284 |
| | TGACAAGGGAACTGAAGGTGGTGAAGACATACTGGC | |
| | AGGCTAC | |
| TEE-275 | AACAGCAATAGACACAAAGTCAGCACTTACAGTACA | 5285 |
| | AAAACTAATGGCAAAAGCACATGAAGTGGGACAT | |
| TEE-276 | TGTAACACTGCAAACCATAAAAACCGTAGAAGAAAA | 5286 |
| | CCTAGACAATACTATTCAGGACATAGGCATGGGCAA | |
| | AGAC | |
| TEE-277 | GAAGAAGAAAAAACATGGATATACAATGTCAACAG | 5287 |
| | AAATCAAGGAGAAACGGAATTTCACCAATCAATTTA | |
| | GTGATCTGGGTT | |
| TEE-278 | AAAACACACAAACATACATGTGGATGCACATATAAA | 5288 |
| | CATGCACATACACACACACATAAATGCACAAACACA | |
| | CTTAACACAAGCACACATGCAAACAAACACATGG | |
| TEE-279 | TAGAAGGAATTTGATACATGCTCAGAAATACAGGCA | 5289 |
| | AAGGAAGTAGGTGCCTGCCAGTGAACACAGGGGAA | |
| | CTATGGCTCCTA | |
| TEE-280 | TGACTAAACAGAGTTGAACAAGAACAAAAAGCAAA | 5290 |
| | TTTGCAGAAATGAAATACATACTAATTGAAAGTCCA | |
| | TGGACAGGCTCAACAGATGATATAGATACAGCTAAA | |
| | GAGATAATTAGTGAAATGGATCAG | |
| TEE-281 | AAGTAATAAGACTGAATTAGTAATACAAAGTGTCTC | 5291 |
| | AACAAAGAAAATTGCGGGACTGTTCATGCTCATGGA | |
| | CAGGAAGAATCAATATCATGAAAATGGCC | |
| TEE-282 | ACAGACAGAGATTTAAAACAATAAACAAGCAGTAA | 5292 |
| | GCAAACACAGATAACAAAATGACATGATCCAACAAA | |
| | TACTCAGAAGGAGACTTAGAAATGAATTGAGGGTC | |
| TEE-283 | AGAAAAAAACAAACAGCCCATTAAAAGGTAGACAA | 5293 |
| | AGGACATGAACACTTTTCAAAAGAAGACATACATGT | |
| | GGCCAAACAGCATG | |
| TEE-284 | AAAAATGACCAGAGCAATAGAATGCATTGACCAGAT | 5294 |
| | AAAGACCTTCACGTATGTTGAACTAAAATGTGTGGT | |
| | GCAGGTG | |
| TEE-285 | AATCAGTCTAGATCTTAAAGGAACACCAGAGGGAGT | 5295 |
| | ATTTAAATGTGCCCAATAAGCAAGAATTATGGTGAT | |
| | GTGGAAGTA | |
| TEE-286 | GAATGGAATGGAAAGGAATCGAAACGAAAGGAATG | 5296 |
| | GAGACAGATGGAATGGAATGGAACAGAGAGCAATGG | |
| TEE-287 | GGAATGGAATGAACACGAATGTAATGCAACCCAATA | 5297 |
| | GAATGGAATCGAATGGCATGGAATATAAAGAAATGG | |
| | AATCGAAGAGAATGGAAACAAATGGAATGGAATTG | |
| TEE-288 | AGGACATGAATAGACAATTCTCAAAAGAAGATACAC | 5298 |
| | AAGTGGCAAACAAACACATGAAAAAAGACTCAACA | |
| | TTAGTAATGACCATGGAAATGCAAATC | |
| TEE-289 | TCCAGTCGATCATCATATAGTCAGCACTTATCATACA | 5299 |
| | CCAAGCCGTGTGCAAGGAAAGGGAATACAACCATGA | |
| | ACATGATAGATGGATGGTT | |
| TEE-290 | TACAGATAAGAAAATTGAGACTCAAGAGTATTACAT | 5300 |
| | AAATTGTTTCAGCTACCACAGCAAAAAATGGTATGG | |
| | TTGGGAATCAAGCTCAGGG | |
| TEE-291 | AGCCTATCAAAAAGTGGGCTAAGAATATGAATACAC | 5301 |
| | AATTCTCAAAAGAAGATATACAAATGGGCAACAAAC | |
| | ATATGAAAACATACTCAACATCACTAATGATCAGGG | |
| | AAATG | |
| TEE-292 | GAAAATGAACAATATGAACAAACAAACAAAATTACT | 5302 |
| | ACCCTTACGAAAGTACGTGCATTCTAGTATGGTGAC | |
| | AAAAAGGAAAG | |
| TEE-293 | ACATACGCAAATCAATAAACATAATCCATCACATAA | 5303 |
| | ACAGAACCAAAGACAAAAATCACATGATTATCTCAA | |
| | TAGATGCAGAAAAGGCCTTCGAC | |
| TEE-294 | AAGAGTATCAACAGTAAATTACATTAGCAGAAGAAT | 5304 |
| | CAACAAACATGAAAATAGAAATTATGGTAGCCAAAG | |
| | AACAG | |
| TEE-295 | AATCGAATGGAATCAACATCAAACGGAAAAAAACG | 5305 |
| | GAATTATCGAATGGAATCGAAGAGAATCATCGAATG | |
| | GACC | |
| TEE-296 | GAAAGGAATAGAATGGAATGGATCGTTATGGAAAG | 5306 |
| | ACATCGAATGGGATGGAATTGACTCGAATGGATTGG | |
| | ACTGGAATGGAACGGACTCGAATGGAATGGACTGGA | |
| | ATG | |
| TEE-297 | TAAGCAATTTCAGCAGTCTCAGGATACAAAATCAAT | 5307 |
| | GTGCAAAAATCACAAGCATTCTTATACACCAACAAC | |
| | AGACAAACAGAGAGCCAAATCG | |
| TEE-298 | AACGGAATCAAACGGAATTATCGAATGGAATCGAAG | 5308 |
| | AGAATCATCGAATGGCCACGAATGGAATCATCTAAT | |
| | GGAATGGAATGGAATAATCCATGGACCCGAATG | |
| TEE-299 | ACATCAAACGGAATCAAACGGAATTATCGAATGGAA | 5309 |
| | TCGAAAAGAATCATCGAACGGACTCGAATGGAATCA | |
| | TCTAATGGAATGGAATGGAAG | |
| TEE-300 | ATCGAATGGAATCAACATCAAACGGAAAAAAACGG | 5310 |
| | AATTATCAAATGGAATCGAAGAGAATCATCGAATGG | |
| | ACC | |
| TEE-301 | GAATAATCATTGAACGGAATCGAATGGAAACATCAT | 5311 |
| | CGAATGGAAACGAATGGAATCATCATCGAATGGAAA | |
| | TGAAAGGAGTCATC | |
| TEE-302 | CATCAAACGGAATCAAACGGAATTATCGAATGGAAT | 5312 |
| | CGAAAAGAATCATCGAACGGACTCGAATGGAATCAT | |
| | CTAATGGAATGGAATGGAAGAATCCATGGACTCGAA | |
| | TG | |
| TEE-303 | AAACGGAATCAAACGGAATTATCGAATGGAATCGAA | 5313 |
| | GAGAATCATCGAATGGACTCGAATGGAATCATCTAA | |
| | TGGAATGGAATGGAAGAATCCATGG | |
| TEE-304 | ATACACAAATCAATAAATGTAATCCAGCATATAAAC | 5314 |
| | AGAACCAAAGACAAAAACCATATGATTATCTCAATG | |
| | GATGCAGAAAAGGCC | |
| TEE-305 | AATCGAATAGAATCATCGAATGGACTCGAATGGAAT | 5315 |
| | CATCGAATGTAATGATGGAACAGTC | |
| TEE-306 | TGGAATGGAATCATCGCATAGAATCGAATGGAATTA | 5316 |
| | CCATCGAATGGGATCGAATGGTATCAACATCAAACG | |
| | CAAAAAAACGGAATTATCGAATGGAATCGAAGAGA | |
| | ATCTTCGAACGGACCCG | |
| TEE-307 | ATGGAATGGAATGGAATGGAATTAAATGGAATGGAA | 5317 |
| | AGGAATGGAATCGAATGGAAAGGAATC | |
| TEE-308 | GTCGAAATGAATAGAATGCAATCATCATCAAATGGA | 5318 |
| | ATCCAATGGAATCATCATCAAATAGAATCGAATGGA | |
| | ATCATCAAATGGAATCGAATGGAGTCATTG | |
| TEE-309 | TGGAATTATCGAAAGCAAACGAATAGAATCATCGAA | 5319 |
| | TGGACTCGAATGGAATCATCGAATGGAATGGAATGG | |
| | AACAG | |
| TEE-310 | AAAGGAATGGAATGCAATGGAATGCAATGGAATGC | 5320 |
| | ACAGGAATGGAATGGAATGGAATGGAAAGGAATG | |
| TEE-311 | AATCTAATGGAATCAACATCAAACGGAAAAAAACGG | 5321 |
| | AATTATCGAATGGAATCGAAGAGAATCATCGAATGG | |
| | ACC | |
| TEE-312 | TACACAACAAAAGAAATACTCAACACAGTAAACAGA | 5322 |
| | CAACCTTCAGAACAGGAGAAAATATTTGCAAATACA | |
| | TCTAACAAAGGGCTAATATCCAGAATCT | |
| TEE-313 | TGCAATCCTAGTCTCAGATAAAACAGACATTAAACC | 5323 |
| | AACAAAGATCAAAAGAGACAAAGAAGGCCATTAC | |
| TEE-314 | GAATCGAATGGAATCAACATCAAACGGAAAAAAAC | 5324 |
| | GGAATTATCGAATGGAATCGAAAAGAATCATCGAAT | |
| | GGACC | |
| TEE-315 | AATGGAATCGAATGGAATGCAATCCAATGGAATGGA | 5325 |
| | ATGCAATGCAATGGAATGGAATCGAACGGAATGCAG | |
| | TGGAAGGGAATGG | |
| TEE-316 | GAACACAGAAAAATTTCAAAGGAATAATCAACAGG | 5326 |
| | GATTGATAACTAACTGGATTTAGAGAGCCAAGGCAA | |
| | AGAGAATCAAAGCACAGGGCCTGAGTCGGAG | |
| TEE-317 | AGTTGAATAGAACCAATCCGAATGAAATGGAATGGA | 5327 |
| | ATGGAACGGAATGGAATTGAATGGAATGGAATGGA | |
| | ATGCAATGGA | |
| TEE-318 | AACTCGATTGCAATGGAATGTAATGTAATGGAATGG | 5328 |
| | AATGGAATTAACGCGAATAGAATGGAATGGAATGTA | |
| | ATGGAACGGAATGGAATG | |
| TEE-319 | AAGCGGAATAGAATTGAATCATCATTGAATGGAATC | 5329 |
| | GAGTAGAATCATTGAAATCGAATGGAATCATAGAAT | |
| | GGAATCCAAT | |
| TEE-320 | AATGGAATCGAAAGGAATAGAATGGAATGGATCGTT | 5330 |
| | ATGGAAAGATATCGAATGGAATGGAATTGACTCGAA | |
| | TGGAATGGACTGGAATGGAACG | |
| TEE-321 | TAACGGAATAATCATCGAACAGAATCAAATGGAATC | 5331 |
| | ATCATTGAATGGAATTGAATGGAATCTTCGAATAGA | |
| | CATGAATGGACCATCATCG | |
| TEE-322 | AACGGAATCAAACGGAATTATCGAATGGAATCGAAT | 5332 |
| | AGAATCATCGAACGGACTCGAATGGAATCATCTAAT | |
| | GGAATGGAATGGAAG | |
| TEE-323 | ATTGGAATGGAACGGAACAGAACGGAATGGAATGG | 5333 |
| | AATAGAATGGAATGGAATGGAATGGTATGGAATGGA | |
| | ATGGAATGGTACG | |
| TEE-324 | AATCCACAAAGACAACAGAAGAAAAGACAACAGTA | 5334 |
| | GACAAGGATGTCAACCACATTTTGGAAGAGACAAGT | |
| | AATCAAACACATGGCA | |
| TEE-325 | GAATCGAATGGAATCAACATCAAACGGAAAAAAAC | 5335 |
| | GGAATTATCGAATGGAATCGAAAAGAATCATCGAAC | |
| | GGACTCGAATGGAATCATCTAATGGAATGGAATGGA | |
| | AGAATCCATGG | |
| TEE-326 | AATGGAATCGAATGGAATCATCATCAAATGGAATCT | 5336 |
| | AATGGAATCATTGAACGGAATTGGATGGAATCGTCAT | |
| TEE-327 | CAACATCAAACGGAAAAAAACGGAATTATCGAATGG | 5337 |
| | AATCGAAGAGAATCATCGAATGGACC | |
| TEE-328 | CACAACCAAAGCAATGAAAGAAAAGCACAGACTTAT | 5338 |
| | TGAAATGAAAGTACACACCACAGAATGGGAGCAGG | |
| | CTCAAGCAAGC | |
| TEE-329 | ATCAAAGGGAATCAAGCGGAATTATCGAATGGAATC | 5339 |
| | GAAGAGAATCATCGAATGGACTCGAATGGAATCATG | |
| | TGATGGAATGGAATGGAATAATCCACGGACT | |
| TEE-330 | GGAATCGAATGGAATCAATATCAAACGGAGAAAAA | 5340 |
| | CGGAATTATCGAATGGAATCGAAGAGAATCATCGAA | |
| | TGGACC | |
| TEE-331 | AGGAATGGACACGAACGGAATGCAATCGAATGGAA | 5341 |
| | TGGAATCTAATAGAAAGGAATTGAATGAAATGGACT | |
| | GG | |
| TEE-332 | GGAAGGGAATCAAATGCAACAGAATGTAATGGAAT | 5342 |
| | GGAATGCAATGGAATGCAATGGAATGGAATGGAATG | |
| | CAATGGAATGG | |
| TEE-333 | AAATTGGATTGAATCGAATCGAATGGAAAAAATGAA | 5343 |
| | ATCAAATGAAATTGAATGGAATCGAAATGAATGTAA | |
| | ACAATGGAATCCAATGGAATCCAATGGAATCGAATC | |
| | AAATGGTTTTGAGTGGCGTAAAATG | |
| TEE-334 | AATGGAAGGGAATGGAATGGAATCGAATCGAATGG | 5344 |
| | AACAGAATTCAATGGAATGGAATGGAATGGAATGGA | |
| | ATCGAATGGAATGG | |
| TEE-335 | GAAAAATCATTGAACGGAATCGAATGGAATCATCAT | 5345 |
| | CGGATGGAAACGAATGGAATCATCATCGAATGGAAA | |
| | TGAAAGGAGTCATC | |
| TEE-336 | GGAATCGAATGGAATCAACATCAAACGGAGAAAAA | 5346 |
| | CGGAATTATCGAATGGAATCGAAGAGAATCATCGAA | |
| | TGGACC | |
| TEE-337 | AAAGAAATGTCACTGCGTATACACACACACGCACAT | 5347 |
| | ACACACACCATGGAATACTACTCAGCTATACAAAGG | |
| | AATGAAATAATCCACAGCCAC | |
| TEE-338 | GGAATCGAATGGAATCAATATCAAACGGAAAAAAA | 5348 |
| | CGGAATTATCGAATGGAATCGAAGAGAATCATCGAA | |
| | TGGACC | |
| TEE-339 | TGAACGGAATCGAATGGAATCATCATCGGATGGAAA | 5349 |
| | CGAATGGAATCATCATCGAATGGAAATGAAAGGAGT | |
| | CATC | |
| TEE-340 | GAATAGAACGAAATGGAATGGAATGGAATGGAATG | 5350 |
| | GAAAGGAATGGAATGGAATGGAACG | |
| TEE-341 | TGGAATTATCGTCGAATAGAATCGAATGGTATCAAC | 5351 |
| | ATCAAACGGAAAAAAACGGAATTATCGAATGGAATC | |
| | GAAGAGAATCATCGAACGGACTCGAATGGAATCATC | |
| | TAATGGAATGGAATGGAATAATCCATGG | |
| TEE-342 | GACAAAAAGAATCATCATCGAATAGAATCAAATGGA | 5352 |
| | ATCTTTGAATGGACTCAAAAGGAATATCGTCAAATG | |
| | GAATCAAAAGCCATCATCGAATGGACTGAAATGGAA | |
| | TTATCAAATGGACTCG | |
| TEE-343 | AACCAAACCAAGCAAACAAACAAACAGTAAAAACT | 5353 |
| | CAATAACAACCAACAAACAGGAAATACCAGGTAATT | |
| | CAGATTATCTAGTTATGTGCCATAGT | |
| TEE-344 | GAATGAATTGAATGCAAACATCGAATGGTCTCGAAT | 5354 |
| | GGAATCATCTTCAAATGGAATGGAATGGAATCATCG | |
| | CATAGAATCGAATGGAATTATCAACGAATGGAATCG | |
| | AATGGAATCATCATCAGATGGAAATGAATGGAATCG | |
| | TCAT | |
| TEE-345 | TGGAATGGAATCAAATCGCATGGAATCGAATGGAAT | 5355 |
| | AGAAAAGAATCAAACAGAGTGGAATGGAATGGAAT | |
| | GGAATGGAATCATGCCGAATGGAATG | |
| TEE-346 | AAATGGAATAATGAAATGGAATCGAACGGAATCATC | 5356 |
| | ATCAAAAGGAACCGAATGAAGTCATTGAATGGAATC | |
| | AAAGGCAATCATGGTCGAATGGAATCAAATGGAAAC | |
| | AGCATTGAATAGAATTGAATGGAGTCATCACATGGA | |
| | ATCG | |
| TEE-347 | GAATTAACCCGAATAGAATGGAATGGAATGGAATGG | 5357 |
| | AACAGAACGGAACGGAATGGAATGGAATGGAATGG | |
| | AATGGAATG | |
| TEE-348 | AAGATATACAAGCAGCCAACAAACATACGAAAGAA | 5358 |
| | TGCTCAACATCACTAATCCTCAGAGAAATTTAAATCA | |
| | AAACCACAATGAGTTACAATCTCATACCAGTCAGAAT | |
| TEE-349 | AGATAAGTGGATGAACAGATGGACAGATGGATGGAT | 5359 |
| | GGATGGATGGATGGATGGATGCCTGGAAGAAAGAA | |
| | GAATGGATAGTAAGCTGGGTATA | |
| TEE-350 | AGAATTACAAACCACTGCTCAACAAAATAAAAGAGT | 5360 |
| | ACACAAACAAATGGAAGAATATTCCATGCTTATGGA | |
| | TAGGAAGAATCAATATTGTGAAAATGGCCATACT | |
| TEE-351 | CATCGAATGGACTCGAATGGAATAATCATTGAACGG | 5361 |
| | AATCGAAGGGAATCATCATCGGATGGAAACGAATGG | |
| | AATCATCATCGAATGGAAATG | |
| TEE-352 | AAAGGAATCAAACGGAATTATCGAATGGAATCGAAA | 5362 |
| | AGAATCATCGAACGGACTCGAATGGAATCATCTAAT | |
| | GGAATGGAATGGAAGAATCCATGGACTCGAATG | |
| TEE-353 | GGATATAAACAAGAAAACAACTAATCACAACTCAAT | 5363 |
| | ATCAAAGTGCAATGATGGTGCAAAATGCAAGTATGG | |
| | TGGGGACAGAGAAAGGATGC | |
| TEE-354 | AACATCAAACGGAAAAAAACGGAAATATCGAATGG | 5364 |
| | AATCGAAGAGAATCATCGAATGGACC | |
| TEE-355 | TAAAATGGAATCGAATGGAATCAACATCAAATGGAA | 5365 |
| | TCAAATGGAATCATTGAACGGAATTGAATGGAATCG | |
| | TCAT | |
| TEE-356 | AATCATCATCGAATGGAATCGAATGGTATCATTGAA | 5366 |
| | TGGAATCGAATGGAATCATCATCAGATGGAAATGAA | |
| | TGGAATCGTCAT | |
| TEE-357 | CAATGCGTCAAGCTCAGACGTGCCTCACTACGGCAA | 5367 |
| | TGCGTCAAGCTCAGGCGTGCCTCACTAT | |
| TEE-358 | TAAGCTGATAAGCAACTTTAGCAAAGTCTCAGGATA | 5368 |
| | CAAAATCAATGTACAAAAATCACAAGCATTCTTATA | |
| | CACCAACAACAGACAGACGGAGAGCCAAA | |
| TEE-359 | AATCAAAGAATTGAATCGAATGGAATCATCTAATGT | 5369 |
| | ACTCGAATGGAATCACCAT | |
| TEE-360 | ATGAACACGAATGTAATGCAATCCAATAGAATGGAA | 5370 |
| | TCGAATGGCATGGAATATAAAGAAATGGAATCGAAG | |
| | AGAATGGAAACAAATGGAATGGAATTGAATGGAAT | |
| | GGAATTG | |
| TEE-361 | ATCAAACGGAATCAAACGGAATTATCGAATGGAATC | 5371 |
| | GAAGAGAATCATCGAACGGACTCGAATGGAATCATC | |
| | TAATGGAATGGGATGG | |
| TEE-362 | AATGGAAAGGAATCAAATGGAATATAATGGAATGCA | 5372 |
| | ATGGACTCGAATGGAATGGAATGGAATGGACCCAAA | |
| | TGGAATGGAATGGAATGGAATG | |
| TEE-363 | GGAATACAACGGAATGGAATCGAAAAAAATGGAAA | 5373 |
| | GGAATGAAATGAATGGAATGGAATGGAATGGAATG | |
| | GATGGGAATGGAATGGAATGG | |
| TEE-364 | GAATCAAGCGGAATTATCGAATGGAATCGAAGAGAA | 5374 |
| | TCATCGAAAGGACTCGAATGGAATCATCTAATGGAA | |
| | TGGAATGGAATAATACACGGACC | |
| TEE-365 | AAGATAACCTGTGCCCAGGAGAAAAACAATCAATGG | 5375 |
| | CAACAAAAGCAGAAACAACACAAATGATACAATTA | |
| | GCAGACAGAAACATTGAGATTGCTATT | |
| TEE-366 | AATGGACTCCAATGGAATAATCATTGAACGGAATCT | 5376 |
| | AATGGAATCATCATCGGATGGAAATGAGTGGAATCA | |
| | TCATCGAATGGAATCG | |
| TEE-367 | AATCTATAAACGTAATCCATCACATAAACAGGACCA | 5377 |
| | AAGAGAAAAACCGCATGATTATCTCAAGAATGCAGA | |
| | AAAGGCC | |
| TEE-368 | TAATTGATTCGAAATTAATGGAATTGAATGGAATGC | 5378 |
| | AATCAAATGGAATGGAATGTAATGCAATGGAATGTA | |
| | ATAGAATGGAAAGCAATGGAATG | |
| TEE-369 | AAAGGAATGGACTTGAACAAAATGAAATCGAACGAT | 5379 |
| | AGGAATCGTACAGAACGGAAAGAAATGGAACGGAA | |
| | TGGAATG | |
| TEE-370 | TGAGCAGGGAACAATGCGGATAAATTTCACAAATAC | 5380 |
| | AATGTTGAGCAAAAGAAAGACACAAAAGAATACAC | |
| | ACATACACACCATATGGGCTAGG | |
| TEE-371 | AATGGAATCGAACGGAATCATCATCAAACGGAACCG | 5381 |
| | AATGGAATCATTGAATGGAATCAAAGGCAATCATGG | |
| | TCGAATG | |
| TEE-372 | AATGGAATGGAATGTACAAGAAAGGAATGGAATGA | 5382 |
| | AACCGAATGGAATGGAATGGACGCAAAATGAATGG | |
| | AATGGAAGTCAATGG | |
| TEE-373 | AACGGAAAAAAACGGAATTATCGAATGGAATCGAA | 5383 |
| | GAGAATCATCGAATGGACC | |
| TEE-374 | GGAATAATCATTGAACGGAATCGAATGGAATCATCA | 5384 |
| | TCGGATGGAAACGAATGGAATCATCATCGAATGGAA | |
| | ATGAAAGGAGTCATC | |
| TEE-375 | GGAACGAAATCGAATGGAACGGAATAGAATAGACT | 5385 |
| | CGAATGTAATGGATTGCTATGTAATTGATTCGAATGG | |
| | AATGGAATCG | |
| TEE-376 | TGAAAGGAATAGACTGGAACAAAATGAAATCGAAT | 5386 |
| | GGTAGGAATCATACAGAACAGAAAGAAATGGAACG | |
| | GAATGGAATG | |
| TEE-377 | AACCCGAATAGAATGGAATGGAATGGAATGGAACG | 5387 |
| | GAACGGAATGGAATGGAATGGATTGGAATGGAATG | |
| | GAATG | |
| TEE-378 | AAAGAGAATCAAATGGAATTGAATCGAATGGAATCG | 5388 |
| | AATGGATTGGAAAGGAATAGAATGGAATGGAATGG | |
| | AATGGAATGGAATGGAATG | |
| TEE-379 | AATGGAATCATCAGTAATGGAATGGAAAGGAATGGA | 5389 |
| | AAGGACTGGAATGGAATGGAATGGAATGGAATGG | |
| TEE-380 | GGAACAAAATGAAATCGAACGGTAGGAATCGTACA | 5390 |
| | GAACGGAAAGAAATGGAACGGAATGGAATGCACTC | |
| | AAATGGAAAGGAGTCCAATGGAATCGAAAGGAATA | |
| | GAATGGAATGG | |
| TEE-381 | AGAATGAGATCAAGCAGTATAATAAAGGAAGAAGT | 5391 |
| | AGCAAAATTACAACAGAGCAGTGAAATGGATATGCT | |
| | TTCTGGCAATAATTGTGAAAGGTCTGGTAATGAGAA | |
| | AGTAGCAACAGCTAGTGGCTGCCAC | |
| TEE-382 | AACAAATGGAATCAACATCGAATGGAATCGAATGGA | 5392 |
| | AACACCATCGAATTGAAACGAATGGAATTATCATGA | |
| | AATTGAAATGGATGGACTCATCATCG | |
| TEE-383 | TAACATGCAGCATGCACACACGAATACACAACACAC | 5393 |
| | AAACATGTATGCACGCACACGTGAATACACAACACA | |
| | CACAAACATGCATGCATGCATACATGAATACACAGC | |
| | ACACAAATATCCAGCAT | |
| TEE-384 | GAATGGAATCAACATCAAACGGAAAAAAAACGGAA | 5394 |
| | TTATCGAATGGAATCGAATAGAATCATCGAATGGACC | |
| TEE-385 | AATCGAATGAAATGGAGTCAAAAGGAATGGAATCG | 5395 |
| | AATGGCAAGAAATCGAATGTAATGGAATCGCAAGGA | |
| | ATTGATGTGAACGGAACGGAATGGAAT | |
| TEE-386 | AATGGAATTGAACGGAAACATCAGCGAATGGAATCG | 5396 |
| | AAAGGAATCATCATGGAATAGATTCGAATGGAATGG | |
| | AAAGGAATGGAATGGAATG | |
| TEE-387 | ATGGAATCAACATCAAACAGAATCAAACGGAATTAT | 5397 |
| | CGAATGGAATCGAAGACAATCATCGAATGGACTCGA | |
| | ATGGAATCATCTAATGGAATGGAATGGAAGAATCCA | |
| | TGGTCTCGAATGCAATCATCATCG | |
| TEE-388 | GAATAATCATTGAACGGAATCGAATGGAATCATCTT | 5398 |
| | CGGATGGAAACGAATGGAATCATCATCGAATGGAAA | |
| | TGAAAGGAGTCATC | |
| TEE-389 | AATGGACTCGAATGGAATAATCATTGAACGGAATCG | 5399 |
| | AATGGAATCATCATCGGATGGAAATGAGTGGAATCA | |
| | TCATCGAATGGAATCG | |
| TEE-390 | AAATGAAATCGAACGGTAGGAATCGTACAGAACGG | 5400 |
| | AAAGAAATGGAACGGAATGGAATGCAATCGAATGG | |
| | AAAGGAGTCCAATGGAAGGGAATCGAAT | |
| TEE-391 | TACCAAACATTTAAAGAACAAATATCAATCCTACGC | 5401 |
| | AAACCATTCTGAAACACAGAGATGGAGGATATACAG | |
| | CGAAACTCATTCTACATGGCC | |
| TEE-392 | TATTGGAATGGAATGGAATGGAGTCGAATGGAACGG | 5402 |
| | AATGCACTCGAATGGAAGGCAATGCAATGGAATGCA | |
| | CTCAACAGGAATAGAATGGAATGGAATGGAATGG | |
| TEE-393 | GGAATTTAATAGAATGTACCCGAATGGAACGGAATG | 5403 |
| | GAATGGAATTGTATGGCATGGAATGGAA | |
| TEE-394 | GCAATCCAATAGAATGGAATCGAATGGCATGGAATA | 5404 |
| | TAAAGAAATGGAATCGAAGAGAATGGAGACAAATG | |
| | GAATGGAATTGAATGGAATGGAATTG | |
| TEE-395 | AATGGAATCGAATGGAATCATCATCAAATGGAATCT | 5405 |
| | AATGGAATCATTGAACGGAATTAAATGGAATCGTCA | |
| | TCGAATGAATTCAATGCAATCAACGAATGGTCTCGA | |
| | ATGGAACCAC | |
| TEE-396 | AATTGCAAAAGAAACACACATATACACATATAAAAC | 5406 |
| | TCAAGAAAGACAAAACTAACCTATGGTGATAGAAAT | |
| | CAGAAAAGTACAGTACATTGGTTGTCTTGGTGGG | |
| TEE-397 | TGACATCATTATTATCAAGAAACATTCTTACCACTGT | 5407 |
| | TACCAACTTCCCAACACAGACTATGGAGAGAGAGAT | |
| | AAGACAGAATAGCATT | |
| TEE-398 | AAAGAATTGAATTGAATAGAATCACCAATGAATTGA | 5408 |
| | ATCGAATGGAATCGTCATCGAATGGAATCGAAGGGA | |
| | ATCATTGGATGGGCTCA | |
| TEE-399 | ATCATCGAATGGAATCGAATGGAATCAATATCAAAC | 5409 |
| | GGAAAAAAACGGAATTATCGAATGGAATCGAATAG | |
| | AATCATCGAATGGACC | |
| TEE-400 | GAATGAAATCGTATAGAATCATCGAATGCAACTGAA | 5410 |
| | TGGAATCATTAAATGGACTTGAAAGGAATTATTATG | |
| | GAATGGAATTG | |
| TEE-401 | TAAGCAACTTCAGCAAAGTCTCAGGATACAAAATCA | 5411 |
| | ATGTGCAAAAATCTCAAGCATTCTTATACACGAACA | |
| | ACAGACAAACAGAGAGCT | |
| TEE-402 | ACTCAAAAGGAATTGATTCGAATGGAATAGAATGGC | 5412 |
| | AAGGAATAGTATTGAATTGAATGGAATGGAATGGAC | |
| | CCAAATG | |
| TEE-403 | GAATGGAATTTAAAGGAATAGAATGGAAGGAATCG | 5413 |
| | GATGGAATGGAATGGAATAGAATGGAGTCGAATGG | |
| | AATAGAATCGAATGGAATGGCATTG | |
| TEE-404 | TGAGAAAATGATGGAAAAGAGGAATAAAACGAAAC | 5414 |
| | AAAACCACAGGAACACAGGTGCATGTGAATGTGCAC | |
| | AGACAAAGATACAGGGCGGACTGGGAAGGAAGTTT | |
| | CTGCACCAGAATTTGGGG | |
| TEE-405 | AACAAAAAATGAGTCAAGCCTTAAATAAAATCAGAG | 5415 |
| | CCAAAAAAGAAGACATTACATCTGATAAGACAAAAA | |
| | TTCAAAGGACCATC | |
| TEE-406 | AACCCAGTGGAATTGAATTGAATGGAATTGAATGGA | 5416 |
| | ATGGAAAGAATCAATCCGAGTCGAATGGAATGGTAT | |
| | GGAATGGAATGGCATGGAATCAAC | |
| TEE-407 | ATCAACATCAAACGGAAAAAAAACGGAATTATCGAA | 5417 |
| | TGGAATCGAAGAGAATCATCGAATGGACC | |
| TEE-408 | AAGGAATGGAATGGTACGGAATAGAATGGAATGGA | 5418 |
| | ACGAATTGTAATGGAATGGAATTTAATGGAACGGAA | |
| | TGGAATGGAATGGAATCAACG | |
| TEE-409 | AACGGAATGGAAAGCAATTTAATCAAATGCAATACA | 5419 |
| | GTGGAATTGAAGGGAATGGAATGGAATGGC | |
| TEE-410 | AATCGAATGGAACGGAATAGAATAGACTCGAATGTA | 5420 |
| | ATGGATTGCTATGTAATTGATTCGAATGGAATGGAA | |
| | TCGAATGGAATGCAATCCAATGGAATGGAATGCAAT | |
| | GCAATGGAATGGAATCGAACGGAATGCAGTGGAAG | |
| | GGAATGG | |
| TEE-411 | TAGCAACATTTTAGTAACATGATAGAAACAAAACAG | 5421 |
| | CAACATAGCAATGCAATAGTAACACAACAGCAACAT | |
| | CATAACATGGCAGCA | |
| TEE-412 | AATGGAATCGAAGAGAATGGAAACAAATGGAATGG | 5422 |
| | AATTGAATGGAATGGAATTGAATGGAATGGGAAGGA | |
| | ATGGAGTG | |
| TEE-413 | AGCAAACAAGTGAATAAACAAGCAAACAAGTGAAC | 5423 |
| | AAGCAAACAAGTGAATAAACAAGCAAACAAGTGAA | |
| | CAAGCAAACAAGTGAATAAACAAGCAAACAAGTGA | |
| | ACAAGGAAACAAGTGAATAAACAAAGGCTCT | |
| TEE-414 | AATGGAATCAACACGAGTGCAATTGAATGGAATCGA | 5424 |
| | ATGGAATGGAATGGAATGGAATGAATTCAACCCGAA | |
| | TGGAATGGAAAGGAATGGAATC | |
| TEE-415 | GAATCGAATGGAATCAACATCAAACGGAAAAAAAC | 5425 |
| | GGAATTATCGAATGGAATCGAAGAGAATCATCGAAT | |
| | GGACC | |
| TEE-416 | AACACGAATGTAATGCAATCCAATAGAATGGAATCG | 5426 |
| | AATGGCATGGAATATAAAGAAATGGAATCGAAGAG | |
| | AATGGAAACAAACGGAATGGAATTGAATGGAATGG | |
| | AATTGAATGGAATGGGAACGAATGGAGTGAAATTG | |
| TEE-417 | GAATGGAACGGAATAGAACAGACTCGAATGTAATGG | 5427 |
| | ATTGCTATGTAATTGATTCGAATGGAATGGAATCGA | |
| | ATGGAATGCAATCCAATGGAATGGAATGCAATGCAA | |
| | TGGAATGGAATCGAATGGAATGCAGTGGAAGGGAAT | |
| | GG | |
| TEE-418 | GAATCGAATGGAATCAATATCAAACGGAAAAAAAC | 5428 |
| | GGAATTATCGAATGGAATCGAAGAGAATCATCGAAT | |
| | GGACC | |
| TEE-419 | ATAAACATCAAACGGAATCAAACGGAATTATCGAAT | 5429 |
| | GGAATCGAAGAGAATAATCGAATGGACTCAAATGGA | |
| | GTCATCTAATGGAATGGTATGGAAGAATCCATGGAC | |
| | TCCAACGCAATCATCAGCGAATGGAATC | |
| TEE-420 | AAAAGAAAAGACAAAAGACACCAATTGCCAATACT | 5430 |
| | GAAATGAAAAAACAGGTAATAACTATTGATCCCATG | |
| | GACATTAAAATGATGTTGAAGGAACACCAC | |
| TEE-421 | AATGTCAAGTGGAATCGAGTGGAATCATCGAAAGAA | 5431 |
| | ATCGAATGGAATCGAAGGGAATCATTGGATGGGCTC | |
| | AAAT | |
| TEE-422 | ATCATCGAATGGAATAGAATGGTATCAACATCAAAC | 5432 |
| | GGAGAAAAACGGAATTATCGAATGGAATCGAAGAG | |
| | AATCTTCGAACGGACC | |
| TEE-423 | GAATGGAATCATCGCATAGAATCGGATGGAATTATC | 5433 |
| | ATCGAATGGAATCGAATGGTATCAACATCAAACGGA | |
| | AAAAAACGGAATTATCGAATGGAATCGAATTGAATC | |
| | ATCGAACGGACCCG | |
| TEE-424 | AATGGACTCGAATGGAATAATCATTGAACGGAATCG | 5434 |
| | AATGGAATCATCATCGGATGGAAATGAATGGAATAA | |
| | TCCATGGACTCGAATGCAATCATCATCGAATGGAAT | |
| | CGAATGGAATCATCGAATGGACTCG | |
| TEE-425 | AATGCAATCATCAACTGGCTTCGAATGGAATCATCA | 5435 |
| | AGAATGGAATCGAATGGAATCATCGAATGGACTC | |
| TEE-426 | AAGAGACCAATAAGGAATAAGTAAGCAACAAGAGG | 5436 |
| | AAGGAGAAAAGGGCAAGAGAGATGACCAGAGTT | |
| TEE-427 | TGGAATCATCATAAAATGGAATCGAATGGAATCAAC | 5437 |
| | ATCAAATGGAATCAAATGGAATCATTGAACGGAATT | |
| | GAATGGAATCGTCAT | |
| TEE-428 | GGAATCATCGCATAGAATCGAATGGAATTATCATCG | 5438 |
| | AATGGAATCGAATGGAATCAACATCAAACGAAAAA | |
| | AAACCGGAATTATCGAATGGAATCGAAGAGAATCAT | |
| | CGAACGGACC | |
| TEE-429 | AAATCATCATCGAATGGGATCGAATGGTATCCTTGA | 5439 |
| | ATGGAATCGAATGGAATCATCATCAGATGGAAATGA | |
| | ATGGAATCGTCAT | |
| TEE-430 | GGAATGTAATAGAACGGAAAGCAATGGAATGGAAC | 5440 |
| | GCACTGGATTCGAGTGCAATGGAATCTATTGGAATG | |
| | GAATCGAATGGAATGGTTTGGCATGGAATGGAC | |
| TEE-431 | AAACAATGGAAGATAATGGAAAGATATCGAATGGA | 5441 |
| | ATAGAATGGAATGGAATGGACTCAAATGGAATGGAC | |
| | TTTAATGGAATGG | |
| TEE-432 | GGAACGAAATCGAATGGAACGGAATAGAATAGACT | 5442 |
| | CGAATGTAATGGATTGCTATGTAATTGATTCGAATGG | |
| | AATGGAATCGAATGGAATGCAATCCAATGGAATGGA | |
| | ATGCAATGCAATGAATGGAATGGAATGGAATGGAAT | |
| | GGAA | |
| TEE-433 | AAACCGAATGGAATGGAATGGACGCAAAATGAATG | 5443 |
| | GAATGGAAGTCAATGGACTCGAAATGAATGGAATGG | |
| | AATGGAATGGAATG | |
| TEE-434 | GGAATCGAATGGAATCAACATCAAACGGAAAAAAA | 5444 |
| | CAGAATTATCGTATGGAATCGAATAGAATCATCGAA | |
| | TGGACC | |
| TEE-435 | CAACCCGAGTGGAATAAAATGGAATGGAATGGAATG | 5445 |
| | AAATGGAATGGATCGGAATGGAATCCAATGGAATCA | |
| | ACTGGAATGGAATGGAATGGAATG | |
| TEE-436 | TATCATCGAATGGAATCGAATGGAATCAACATCAAA | 5446 |
| | CGGAAAAAAACGGAATTATCGAATGGAATCGAAGA | |
| | GAATCATCGAATGGACC | |
| TEE-437 | CGGAATAATCATTGAACGGAATCGAATGGAATCATC | 5447 |
| | ATCGGATGGAAACGAATGGAATCATCATCGAATGGA | |
| | AATGAAAGGAGTCATC | |
| TEE-438 | CAACACACAGAGATTAAAACAAACAAACAAACAAT | 5448 |
| | CCAGCCCTGACATTTATGAGTTTACAGACTGGTGGA | |
| | GAGGCAGAGAAG | |
| TEE-439 | CACTACAAACCACGCTCAAGGCAATAAAAGAACACA | 5449 |
| | AACAAATGGAAAAACATTCCATGCTCATGGATGGG | |
| TEE-440 | AATCGAATGGAATTAACATCAAACGGAAAAAAACG | 5450 |
| | GAATTATCGAATGGAATCGAAGAGAATCATCGAATG | |
| | GACC | |
| TEE-441 | TGGAAAAGAATCAAATTGAATGGCATCGAACGGAAT | 5451 |
| | GGGATGGAATGGAATAGACCCAGATGTAATGGACTC | |
| | GAATGGAATG | |
| TEE-442 | GACTAATATTCAGAATATACAAGGAACTCAAACAAC | 5452 |
| | TCAACAGTAGAAAAAAAAACCTGAATAGACATTTCT | |
| | CAAAAGAAGACATACAAATGGCC | |
| TEE-443 | GGTCCATTCGATGATTCTCTTCGATTCCATTCGATAA | 5453 |
| | TTCCGTTTTTTCCCGTTTGATGTTGATTCC | |
| TEE-444 | GGAACGAAATCGAATGGAACGGAATAGAATAGACT | 5454 |
| | CGAATGTAATGGATTGCTATGTAATTGATTCGAATGG | |
| | AATGGAATCGAATGGAATGCAATCCAATGGAATGGA | |
| | ATGCAATGCAATGAATGGAATGGAATGGAATGGAAT | |
| | GGA | |
| TEE-445 | AGCAACTTCAGTAAAGTGTCAGGATACAAAATCAAT | 5455 |
| | GTGCAAAAATCACAAGCATTCTTATACATCAATAAC | |
| | AGACAAACAGAGAGCCAAA | |
| TEE-446 | GAATAATCATTGAACGGAATCGAATGGAATCATCAT | 5456 |
| | CGGATGGAAACGAATGGAATCATCATCGAATGGAAA | |
| | TGAAAGGAGTCATC | |
| TEE-447 | TAATCATCTTCGAATTGAAAACAAAGCAATCATTAA | 5457 |
| | ATGTACTCTAACGGAATCATCGAATGGACC | |
| TEE-448 | GGAATCGAATGGAATCAACATCAAACGGAAAAAAA | 5458 |
| | CGGAATTATCGAATGGAATCGAAGAGAATCATCGAA | |
| | TGGACC | |
| TEE-449 | AGAGAAAAGATGATCATGTAACCATTGAAAAGACAA | 5459 |
| | TGTACAAAACTAATACTAATCACACAGGACCAGAAA | |
| | GCAATTTAGACCAT | |
| TEE-450 | AATGGAATCGAATGGAATCAACATCAAACGGAAAA | 5460 |
| | AACGGAATTATCGAATGGAATCAAAGAGAATCATCG | |
| | AATGGACC | |
| TEE-451 | AATGGAATTATCATCGAATGGAATCGAATGGAATCA | 5461 |
| | ACATCAAACGGAAAAAAACGGAATTATCGAATGGA | |
| | ATCGAAGAGAATCATCGAATGGACC | |
| TEE-452 | GTCAACACAGGACCAACATAGGACCAACACAGGGTC | 5462 |
| | AACACAGGACCAACATAGGACCAACACAGGGTCAA | |
| | CACAAGACCAACATGGGACCAACACAGGGTCAACAT | |
| | AGGACCAACATGGGACCAACACAGGGTCAACACAG | |
| | GACCAAC | |
| TEE-453 | GAATCAACTCGATTGCAATCGAATGGAATGGAATGG | 5463 |
| | TATTAACAGAATAGAATGGAATGGAATGGAATGGAA | |
| | CGGAACG | |
| TEE-454 | ACTCGAATGCAATCAACATCAAACGGAATCAAACGG | 5464 |
| | AATTATCGAATGGAATCGAAGAGAATCATCGAACGG | |
| | ACTCGAATGGAATCATCTAATGGAATGGAATGG | |
| TEE-455 | AATGGAATGGAATAATCGACGGACCCGAATGCAATC | 5465 |
| | ATCATCGTACAGAATCGAATGGAATCATCGAATGGA | |
| | CTGGAATGGAATGG | |
| TEE-456 | AATACAAACCACTGCTCAACGAAATAAAAGAGGATA | 5466 |
| | CAAACAAATGGAAGAACATTCTATGCTCATGGGTAG | |
| | GATGAATTCATATCGTGAAAATGGCCATACTGCC | |
| TEE-457 | AAACACGCAAACACACACACAAGCACACTACCACAC | 5467 |
| | AAGCGGACACACATGCAAACACGCGAACACACACA | |
| | CATATACACACAAGCACATTACAAAACACAAGCAAA | |
| | CACCAGCAGACACACAAACACACAAACATACATGG | |
| TEE-458 | AATCGAACGGAATCAACATCAAACGGAAAAAAAAC | 5468 |
| | GGAATTATCGAATGGAATCGAAGAGAATCATCGAAT | |
| | GGACC | |
| TEE-459 | TAATTGATTCGAATGGAATGGAATAGAATGGAATTG | 5469 |
| | AATGGAATGGACCATAATGGATTGGACTTTAATAGA | |
| | AAGGGCATG | |
| TEE-460 | AGCAACTTCAGCAAAGTCTCAGGATACAAAATCAAT | 5470 |
| | GTACAAAAGTCACAAGCATTCTTATACACCAACAAA | |
| | AGACAAACAGAGAGCC | |
| TEE-461 | ACATCAAACGGAAAAAAAAAACAAAACGGAATTAT | 5471 |
| | CGAATGGAATCGAAGAGAATCATCGAATGGACC | |
| TEE-462 | GAAATTCCAATTAAAATGAAATCGACTTATCTTAAC | 5472 |
| | AAATATAGCAATGCTGACAACACTTCTCCGGATATG | |
| | GGTACTGCT | |
| TEE-463 | ACATCTCACTTTTAGTAATGAACAGATCATTCAGACA | 5473 |
| | GAAAATTAGCAAAGAAACATCAGAGTTAAACTACAC | |
| | TCTAAACCAAATGGACCTA | |
| TEE-464 | GAAGAAAGCATTCATTCAAGACATCTAACTCGTTGA | 5474 |
| | TATAATGCATACAGTTCAAAATGATTACACTATCATT | |
| | ACATCTAGGGCTTTC | |
| TEE-465 | ACACACACATTCAAAGCAGCAATATTTACAACAGCC | 5475 |
| | AAAAGGTGGAAACAATTGAGCAATTG | |
| TEE-466 | ATCATCGAATAGAATCGAATGGTATCAACACCAAAC | 5476 |
| | GGAAAAAAACGGAATTATCGAATGGAATCGAAGAG | |
| | AATCTTCGAACGGACC | |
| TEE-467 | ATCAACATCAAACGGAAAAAACGGAATTATCGAATG | 5477 |
| | GAATCGAAGAGAATCATCGAACGGACC | |
| TEE-468 | AATCGAAAGGAATGTCATCGAATGGAATGGACTCAA | 5478 |
| | ATGGAATAGAATCGGATGGAATGGCATCGAATGGAA | |
| | TGGAATGGAATTGGATGGAC | |
| TEE-469 | AACATGAACAGTGGAACAATCAGTGAACCAATACAA | 5479 |
| | GGGTTAAATAAGCTAGCAATTAAAAGCTGTATCACT | |
| | GGTCTAAAGATAGAAGATCAAGTAGAAAATCAGCGC | |
| | AAGAGGAAAGATATACGAAAACTAATGGCC | |
| TEE-470 | CGAATGGAATCATTATGGAATGGAATGAAATGGAAT | 5480 |
| | AATCAAATGGAATTGAATGGAATCATCGAATGGAAT | |
| | CGAACAAAATCCTCTTTGAATGGAATAAGATGGAAT | |
| | CACCAAATGGAATTG | |
| TEE-471 | AAGGGAATTGAATAGAATGAATCCGAATGGAATGGA | 5481 |
| | ATGGAATGGAATGGAATGGAATGGAATGGAATGGA | |
| | ATGGAATG | |
| TEE-472 | GAATGGAATCGAATCAAATTAAATCAAATGGAATGC | 5482 |
| | AATAGAAGGGAATACAATGGAATAGAATGGAATGG | |
| | AATGGAATGGACT | |
| TEE-473 | AAACGGAATCAAACGGAATTATCGAATGGAATCGAA | 5483 |
| | GAGAATCATCGAACGGACTCGAATGGAATCATCTAA | |
| | TGGAATGGAATGGAAGAATCCATGGACT | |
| TEE-474 | ATGGAATCAACATCAAACGGAAAAAAAAACGGAAT | 5484 |
| | TATCGAATGGAATCGAAGAGAATCATCGAATGGACC | |
| | AGAATGGAATCATCTAATGGAATGGAATGG | |
| TEE-475 | AATGGAATCATCATCGAATGGAATCGAATGGAATCA | 5485 |
| | TGGAATGGAATCAAATGGAATCAAATGGAATCGAAT | |
| | GGAATGGAATGGAATG | |
| TEE-476 | AACGGAATCAAACGGAATTACCGAATGGAATCGAAT | 5486 |
| | AGAATCATCGAACGGACTCGAATGGAATCATCTAAT | |
| | GGAATGGAATGGAAG | |
| TEE-477 | AAACGGAATCAAACGGAATTATCGAATGGAATCGAA | 5487 |
| | AAGAATCATCGAACGGACTCGAATGGAATCATCTAA | |
| | TGGAATGGAATGGAAGAATCCATGG | |
| TEE-478 | GAATGATACGGAATACAATGGAATGGAACGAAATG | 5488 |
| | AAATGGAATGGAATGGAATGGAATGGAATGGAATGG | |
| TEE-479 | ACAGCAAGAGAGAAATAAAACGACAAGAAAACTAC | 5489 |
| | AAAATGCCTATCAATAGTTACTTTAAATATCAGTGGA | |
| | CCAAATCAGTGAAACAAAAGACACAGAGTGGC | |
| TEE-480 | AATGGACTCGAATGGATTAATCATTGAACGGAATCG | 5490 |
| | AATGGAATCATCATCGGATGGTAATGAATGGAATCA | |
| | TCATCGAATGGAATCGG | |
| TEE-481 | GAATGGAATCGAAAGGAATGTCATCGAATGGAATGG | 5491 |
| | AATGGAACGGAATGGAATCGAATGGAATGGACTCGA | |
| | ATGGAATAGAATCGAATGCAATGGCATCG | |
| TEE-482 | ATCGAATGGAATCAACATCAGACGGAAAAAAACGG | 5492 |
| | AATTATCAAATGGAATCGAAGAGAATCATCGAATGG | |
| | ACC | |
| TEE-483 | AGCAACTTCAGCAAAGTCTCAGGATACAAAATCAAT | 5493 |
| | GTGCAAAAATCAAAAGCATTCTTATGCACCAATAAC | |
| | AGACACAGAGCCAAAT | |
| TEE-484 | AATGGAATGGAACGCAATTGAATGGAATGGAATGGA | 5494 |
| | ACGGAATCAACCTGAGTCAAATGGAATGGAATGGAA | |
| | TGGAATG | |
| TEE-485 | GGAACGAAATCGAATGGAACGGAATAGAATAGACT | 5495 |
| | CGAATGTCATGGATTGCTATGTAATTGATTGGAATGG | |
| | AATGGAATCG | |
| TEE-486 | TAGCAGGAAACAGCAAACTCAAATTAAGTAATTTCA | 5496 |
| | AGAGCGTATCATCAATGAACTATTTTCAAAGATGTG | |
| | GGCAAGAT | |
| TEE-487 | GAATTGAAAGGAATGTATTGGAATAAAATGGAATCG | 5497 |
| | AATAGGTTGAAATACCATAGGTTCGAATTGAATGGA | |
| | ATGGGAGGGACACCAATGGAATTG | |
| TEE-488 | AAGCAACTTCAGCAAAGTCTCGGGATACAAAATCAA | 5498 |
| | TGTGCAAAAATCACAAGCATTCTTATACACCACTAA | |
| | CAGACAAATGGAGAGTC | |
| TEE-489 | GAATGGAATCAACATCAAACGGAAAAAAACGGAAT | 5499 |
| | TATCGAATGGAATCGAAGAGAATCATCGAATGGACC | |
| | AGAATGGAATCATCTAATGGAATGGAATGGAATAAT | |
| | CCATGG | |
| TEE-490 | AAAAGCAATTGGACTGATTTTAAATATACGTGGCAA | 5500 |
| | CAAGGATAAACTGCTAATGATGGGTTTGCAAATACA | |
| | GATCG | |
| TEE-491 | AATGGAATCAACATCGAACGGAAAAAAACGGAATT | 5501 |
| | ATCGAATGGAATCGAAGAGAATCATCGAATGGACC | |
| TEE-492 | AAACGGAATTATCAAATGGAATCGAAGAGAATCATC | 5502 |
| | GAACGGACTCGAATGGAATCATCTAATGGAATGGAA | |
| | TGGAAG | |
| TEE-493 | TGCAAGATAACACATTTTAGTTGACACCATTGAAAA | 5503 |
| | CAGTTTTAACCAAGAATATTAGAACCAATGAAGCAG | |
| | AGAAATCAAAAGGGTGGATGGAACTGCCAAAGGATG | |
| TEE-494 | TAGAACAGAATTGAATGGAATGGCATCAAATGGAAT | 5504 |
| | GGAAACGAAAGGAATGGAATTGAATGGACTCAAAT | |
| | GTTATGGAATCAAAGGGAATGGACTC | |
| TEE-495 | AAGAGAATCATCGAATGGAATCGAATGGAATCAACA | 5505 |
| | TCAAACGGAAAAAAACGGAATTATCGAATGGAATCG | |
| | AAGAGAATCATCGAATGGACC | |
| TEE-496 | ATCAACATCAAACGGAAAAAAACGGAATTATCGAAT | 5506 |
| | GGAATCGAAGAGAATCATCGAATGGACC | |
| TEE-497 | GAATCAACATCAAACGGAAAAAAACCGAATTATCGA | 5507 |
| | ATGGAATCGAAGAGAATCATCGAATGGACC | |
| TEE-498 | ATCAACATCAAACGGAATCAAACGGAATTATCGAAT | 5508 |
| | GGAATCGAAGAGAATCATCAAATGGACTCGAATGGA | |
| | ATCATCTAATGGAATGGAATGGAAGAATCCATGG | |
| TEE-499 | ATCGAATGGAATCATTGAATGGAAAGGAATGGAATC | 5509 |
| | ATCATGGAATGGAAACGAATGGAATCACTGAATGGA | |
| | CTCGAATGGGATCATCA | |
| TEE-500 | ATTCAGCCTTTAAAAAAAGAAGACAGTCCTGTCATTT | 5510 |
| | GTGACAATATGAATGAAACAGACATCACATTAAATG | |
| | AAATGAGCCAGGCGCAG | |
| TEE-501 | GAATGAAATGAAATCAAATGGAATGTACATGAATGG | 5511 |
| | AATAGAAAAGAATGCATCTTTCTCGAACGGAAGTGC | |
| | ATTGAATGGAAAGGAATCTACTGGAATGGATTCGAA | |
| | TGGAATGGAATGGGATGGAATGGTATGG | |
| TEE-502 | AACATCAAACGGAATCAAACGGAATTATCGAATGGA | 5512 |
| | ATCGAAGAGAATCATCGAACGGACTCGAATGGAATC | |
| | ATCTAATGGAATGGAATGGAAGAATCCATGGACTCG | |
| | AATGCAATCATCATCGAATGAAATCGAATGGAATCA | |
| | TCGAATGGACTCG | |
| TEE-503 | ATGGAATTCAATGGAATGGACATGAATGGAATGGAC | 5513 |
| | TTCAATGGAATGGTATCAAATGGAATGGAATTCAGT | |
| TEE-504 | AATGGAAAGGAATCGAATGGAAGGGAATGAAATTG | 5514 |
| | AATCAACAGGAATGGAAGGGAATAGAATAGACGGC | |
| | AATGGAATGGACTCG | |
| TEE-505 | AGCAACTTCAGCAAAGTATCAGGATACAAAATCAAT | 5515 |
| | GTACAAAAATCCCAAGCATTCTTATACACCAACAAC | |
| | AGACAAACAGAGAGCC | |
| TEE-506 | AGCAACTTCAGCAAAGTCTCAGGATACAAAATCGAT | 5516 |
| | GTGCAAAAATCACAAGCATTCTTATACACCAACAAC | |
| | AGATAAACAGAGAGCC | |
| TEE-507 | AACGGAAAAAAAACGGAATTATCGAATGGAATCGA | 5517 |
| | AGAGAATCATCGAATGGACCAGAATGGAATCATCTA | |
| | ATGGAATGGAATGGAATAATCCATGGACTCGAATG | |
| TEE-508 | GGAATCAAACGGAATTATCGAATGGAATCGAAGAGA | 5518 |
| | ATCATAGAACGGACTCAAATGGAATCATCTAATGGA | |
| | ATGGAATGGGAGAATCCATGGACTCGAATG | |
| TEE-509 | AATGGAATCAATATCAAACGGAAAAAAACGGAATTA | 5519 |
| | TCGAATGGAATCGAAGAGAATCATCGAATGGACC | |
| TEE-510 | AACGGAATCAAACGGAATTATCGAATGGAATCGAAA | 5520 |
| | AGAATCATCGAACGGACTCGAATGGAATCATCTAAT | |
| | GGAATGGAATGGAAGAATCCATGG | |
| TEE-511 | AAACGGAATTATCGAATGGAATCAAAGAGAATCATC | 5521 |
| | GAATGGCCACGAATGGAATCATATAATGGAATGGAA | |
| | TGGAATAATCCATGGACC | |
| TEE-512 | AATGGAATCGAATGGATTGATATCAAATGGAATGGA | 5522 |
| | ATGGAAGGGAATGGAATGGAATGGAATTGAACCAA | |
| | ATGTAATGGATTTG | |
| TEE-513 | TAAAAGACGGAACAGATAGAAAGCAGAAAGGAAAG | 5523 |
| | GTGAATTGCATTACCACTATTCATACTGCCACACACA | |
| | TGACATTAGGCCAAGTC | |
| TEE-514 | AATGGAATCGAATGGAACAATCAAATGGACTCCAAT | 5524 |
| | GGAGTCATCTAATGGAATCGAGTGGAATCATCGAAT | |
| | GGACTCG | |
| TEE-515 | TAACACATAAACAAACACAGAGACAAAATCTCCGAG | 5525 |
| | ATGTTAATCTGCTCCAGCAATACAGAACAATTTCTAT | |
| | TACCAACAGAATGCTTAATTTTTCTGCCT | |
| TEE-516 | GGAATCGAATGGAATCAACATCAAACGGAAAAAAA | 5526 |
| | CGGAATTATCGAATGGAATCAAAGAGAATCATCGAA | |
| | TGGACC | |
| TEE-517 | AGAATGGAAAGGAATCGAAACGAAAGGAATGGAGA | 5527 |
| | CAGATGGAATGGAATG | |
| TEE-518 | GAATCATCATAAAATGGAATCGAATGGAATCAACAT | 5528 |
| | CAAATGGAATCAAATGGTCTCGAATGGAATCATCTT | |
| | CAAATGGAATGGAATGG | |
| TEE-519 | AACAACAATGACAAACAAACAACAACGACAAAGAC | 5529 |
| | ATTTATTTGGTTCACAAATCTCCAGGGTGTACAAGAA | |
| | GCATGGTGCCAGCATCTGCTCAGCTTCTGATGAGGG | |
| | CTCTGGGAAGCTTTTACTC | |
| TEE-520 | AACGGACTCGAACGGAATATAATGGAATGGAATGGA | 5530 |
| | TTCGAAAGGAATGGAATGGAATGGACAGGAAAAGA | |
| | ATTGAATGGGATTGGAATGGAATCG | |
| TEE-521 | AACATCAAACGAAATCAAACGGAATTATCAAATTGA | 5531 |
| | ATCGAAGAGAATCATCGAATTGCCACGAATGCAATC | |
| | ATCTAATGGTATGGAATGGAATAATCCATGGACCCA | |
| | GATG | |
| TEE-522 | AGAAATTAACAGCAAAAGAAGGATGCAGTGCAACTC | 5532 |
| | AGGACAACACATACAATTCAAGCAACAAATGTATAG | |
| | TGGCTGGGCACCAAGGATACAG | |
| TEE-523 | GCAATAAAATCGACTCAGATAGAGAAGAATGCAATG | 5533 |
| | GAATGGAATGGAATGGAATGGAATGGGATGGAATG | |
| | GTATGGAATGG | |
| TEE-524 | AATGGACTCGAATGAAATCATCATCAAACGGAATCG | 5534 |
| | AATGGAATCATTGAATGGAAAGGATGGGATCATCAT | |
| | GGAATGGAAACGAATGGAATCACTG | |
| TEE-525 | CCACATAAAACAAAACTACAAGACAATGATAAAGTT | 5535 |
| | CACAACATTAACACAATCAGTAATGGAAAAGCCTAG | |
| | TCAATGGCAG | |
| TEE-526 | TGGAATGGAATGGAATGGAATCAAATCGCATGGTAA | 5536 |
| | TGAATCAAATGGAATCAAATCGAATGGAAATAATGG | |
| | AATCGAAGGGAAACGAATGGAATCGAATTGCACTGA | |
| | TTCTACTGACTTCGAGGAAAATGAAATGAAATGCGG | |
| | TGAAGTGGAATGG | |
| TEE-527 | GAATGTTATGAAATCAACTCGAACGGAATGCAATAG | 5537 |
| | AATGGAATGGAATGGAATGGAATGGAATGGAATGG | |
| TEE-528 | AATGGAATCATTGAATGGAATGGAATGGAATCATCA | 5538 |
| | AAGAAAGGAATCGAAGGGAATCATCGAATGGAATC | |
| | AAACGGAATCATCGAATGGAATGGAATGGAATG | |
| TEE-529 | GGAATCAACATCAAACGGAAAAAAAACGGAATTATC | 5539 |
| | GAATGGAATCGAAGAGAATCATCGAATGGACC | |
| TEE-530 | GGAATAATCATCATCAAACAGAACCAAATGGAATCA | 5540 |
| | TTGAATGGAATCAAAGGCAATCATGGTCGAATG | |
| TEE-531 | GCATAGAATCGAATGGAATTATCATTGAATGGAATC | 5541 |
| | GAATGGAATCAACATCAAACGGAAAAAAACGGAAT | |
| | TATCGAATGGAATCGAAGAGAATCATCGAATGGACCC | |
| TEE-532 | AATGGAATCGAAGAGAATCATCGAACGGACTCGAAT | 5542 |
| | GGAATCATCTAATGGAATGGAATGGAATAATCCATG | |
| | GACCCGAATG | |
| TEE-533 | AAATGAATCGAATGGAATTGAATGGAATCAAATAGA | 5543 |
| | ACAAATGGAATCGAAATGAATCAAATGGAATCGAAT | |
| | CGAATGGAATTGAATGGCATGGAATTG | |
| TEE-534 | AGTTAATCCGAATAGAATGGAATGGAATGCAATGGA | 5544 |
| | ACGGAATGGAACGGAATGGAATGGAATGGAATGGA | |
| | ATGGAATG | |
| TEE-535 | ATCACAATCACACAACACATTGCACATGCATAACAT | 5545 |
| | GCACTCACAATACACACACAACACATACACAACACA | |
| | CATGCAATACAACACAAAACGCAACACAACATATAC | |
| | ACAACACACAGCACACACATGCC | |
| TEE-536 | AAAGACTTAAACGTTAGACCTAAAACCATAAAAACC | 5546 |
| | CTAGAGGAAAACCTAGGCATTACCATTCAGGACTTA | |
| | GGCATGGGCAAGGAC | |
| TEE-537 | AAAGTCCAAAGATGAACAAAATATCCAGAAGGAAA | 5547 |
| | ACAAATGCACTTGGGGAGTGGGAAAGAAAACCAAG | |
| | ACTGAGCAATGCGTCAAGCTCAGACGTGCCTCACTA | |
| | CG | |
| TEE-538 | AAACGGAATCAAACGGAATTATCGAATGGAGTCGAA | 5548 |
| | AAGAATCATCGAACGGACTCGAATGGAATCATCTAA | |
| | TGGAATGGAATGGAAGAATCCATGG | |
| TEE-539 | AATTGATTCGAAATTAATGGAATTGAATGGAATGCA | 5549 |
| | ATCAAATGGAATGGAATGTAATGCAATGGAATGTAA | |
| | TAGAATGGAAAGCAATGGAATG | |
| TEE-540 | TACAGAACACATGACTCAACAACAGCAGAAAGCATA | 5550 |
| | TTCTTTTCAAATGCACATGAAACATTATCATGATGGA | |
| | CCAAAT | |
| TEE-541 | GGAACAAAATGAAATCGAACGGTAGGAATCATACA | 5551 |
| | GAACAGAAAGAAATGGAACGGAATGGAATG | |
| TEE-542 | AACGGAAAAAACGGAATTATCGAATGGAATCGAAG | 5552 |
| | AGAATCATCGAATGGAATCGAATGGAGTCATCG | |
| TEE-543 | AATCGAACGGAATCAACATCAAACGGAAAAAAACG | 5553 |
| | GAATTATCGAATGGAATCGAAGAGAATCATCGAATG | |
| | GACC | |
| TEE-544 | AGAATGGAATGCAATAGAATGGAATGCAATGGAATG | 5554 |
| | GAGTCATCCGTAATGGAATGGAAAGGAATGCAATGG | |
| | AATGGAATGGAATGG | |
| TEE-545 | ATGGAATCAACATCAAACGGAATCAAACGGAATTAT | 5555 |
| | CGAATGGAATCGAAGAGAATCATCGAACGGATTCGA | |
| | ATGGAATCATCTAATGGAATGGAATGGAAGAATCCA | |
| | TGGACTCGAATGCAATCATCAGCGAATGGAATCGAA | |
| | TGGAATCATCGAATGGACTCG | |
| TEE-546 | GGAATAAAACGGACTCAATAGTAATGGATTGCAATG | 5556 |
| | TAATTGATTCGATTTCGAATGGAATCGCATGGAATGT | |
| | AATGGAATGGAATGGAATGGAAGGC | |
| TEE-547 | AATGGAATCAACATCAAACGGAAAAAAACGGAATT | 5557 |
| | ATCGTATGGAATCGAAAAGAATTATCGAATGGACC | |
| TEE-548 | TCAAACGGAAAAAAACGGAATTATCGAATGGAATCG | 5558 |
| | AAGAGAATCATCGAATGGACC | |
| TEE-549 | ACATCAAACGGAATCAAACGGAATTATCGAATGGAA | 5559 |
| | TCGAAAAGAATCATCGAACGGACTCGAATGGAATCA | |
| | TCTAATGGAATGGAATGGAAGAATCCATGGACTCGA | |
| | ATG | |
| TEE-550 | TGGAATCGAATGGAATCAACATCAAACGGAAAAAA | 5560 |
| | ACGGAATTATCGAATGGAATCGAAGAGAATCATCGA | |
| | ATGGACC | |
| TEE-551 | AATGGAATCGAATGCAATCATCGAACGGAATCGAAT | 5561 |
| | GGCATCACCGAATGGAATGGAATGGAATGGAATGGA | |
| | ATGG | |
| TEE-552 | AGAATTGATTGAATCCAAGTGGAATTGAATGGAATG | 5562 |
| | GAATGGATTAGAAAGGAATGGAATGGATTGGAATGG | |
| | ATTGGAATGGAAAGG | |
| TEE-553 | AACTGCATCAACTAACAGGCAAAATAACCAGCTAAT | 5563 |
| | ATCATAATGACAGGATTAAATTCACAAATGACAATA | |
| | TTAACCGTAAATGTAAATGGGCTA | |
| TEE-554 | GTAAACAAACAATCAAGCAAGTAAGAACAGAAATA | 5564 |
| | ACAGCATTTGGCTTTTGAGTTAATGACAAGAACACTC | |
| | GGCATGGGAGCCTGGGTGAGCAAATCACAGATCTTC | |
| TEE-555 | AAAGGAATGGACTGGAACAAAATGAAATCGAACGG | 5565 |
| | TAGGAATCGTACAGAACGGACAGAAATGGAACGGC | |
| | ATGGAATGCACTCG | |
| TEE-556 | GAATCAACCCGAGCGGAAAGGAATGGAATGGAATG | 5566 |
| | GAATCAACACGAATGGAATGGAACGGAATGGAATG | |
| | GGATGGGATGAAATGGAATGG | |
| TEE-557 | AAGAAATGGAATCGAAGAGAATGGAAACAAACGGA | 5567 |
| | ATGGAATTGAATGGAATGGAATTGAATGGAATGGGA | |
| TEE-558 | GACATGCAAACACAACACACAGCACACATGGAACAT | 5568 |
| | GCATCAGACATGCAAACACAACACACATACCACACA | |
| | TGGCATATGCATCAGACGTGCCTCACTAC | |
| TEE-559 | AAAGGAATGCACTCGAATGGAATGGACTTGAATGGA | 5569 |
| | ATGTCTCCGAATGGAACAGACTCGTATGAAATGGAA | |
| | TCGAATGGAATGGAATCAAATGGAATTGATTTGAGT | |
| | GAAATGGAATCAAATGGAATGGCAACG | |
| TEE-560 | GGAACAAAATGAAATCGAACGGTAGGAATCGTACA | 5570 |
| | GAACGGAAAGAAATGGAACGGAATGGAATGCACTC | |
| | GAATGGAAAGGAGTCCAAT | |
| TEE-561 | AAATTGATTGAAATCATCATAAAATGGAATCGAAGG | 5571 |
| | GAATCAACATCAAATGGAATCAAATGGAATCATTGA | |
| | ACGGAATTGAATGGAATCGTCAT | |
| TEE-562 | AGAATGGAAAGCAATAGAATGGAACGCACTGGATTC | 5572 |
| | GAGTGCAATGGAATCAATTGGAATGGAATCGAATGG | |
| | AATGGATTGGCA | |
| TEE-563 | AACACCAAACGGAAAAAAACGGAATTATCGAATGG | 5573 |
| | AATCGAAGAGAATCTTCGAACGGACCCGAATGGGAT | |
| | CATCTAATGGAATGGAATGGAATAATCCATGG | |
| TEE-564 | AATGGAGACTAATGTAATAGAATCAAATGGAATGGC | 5574 |
| | ATCGAATGGAATGGACTGGAATGGAATGTGCATGAA | |
| | TGGAATGGAATCGAATGGATTG | |
| TEE-565 | AAATCGAATGGAACGCAATAGAATAGACTCGAATGT | 5575 |
| | AATGGATTGCTATGTAATTGATTCGAATGGAATGGA | |
| | ATCGACTGGAATGCAATCCAATGGAATGGAATGCAA | |
| | TGCAATGGAATGGAATCGAACGGAATGCAGTGGAAG | |
| | GGAATGG | |
| TEE-566 | AATCAACAAGGAACTGAAACAAGTAAACAAGAAAA | 5576 |
| | CAAATAACACCATAAAACATGGGCAAAGGACATAA | |
| | ACAGACATTTTTCAAAAAAGACATACAAATGGCCGAG | |
| TEE-567 | AATGGAATCAACATCAAACGGAAAAAAACGGAATT | 5577 |
| | ATCGAATGGAATCGAAGAGAATCATCGAATGGACCC | |
| | AGGCTGGTCTTGAACTCC | |
| TEE-568 | ATTGAATGGGCTAGAATGGAATCATCTTTGAACGGA | 5578 |
| | ATCAAAGGGAATCATCATCGAATGGAATCGAATGGA | |
| | AATGTCAACG | |
| TEE-569 | AATGGACTCGAATGGAATCAACATCAAATGGAATCA | 5579 |
| | AGCGGAATTATCGAATGAAATCGAAGAGAATCATCG | |
| | AATGGACTCGAAAGGAATCATCTAATGGAATGGAAT | |
| | GGAATAATCCATGGACTCGAATGCAATCATCATCG | |
| TEE-570 | AAACGGAAAAAAACGGAATTATTGAATGGAATCGA | 5580 |
| | AGAGAATCTTCGAACGGACCCGAATGGAATCATCTA | |
| | ATGGAATGGAATGGAATAATCCATGG | |
| TEE-571 | ACTCGAGTGGAATTGACTGTAACAAAATGGAAAGTA | 5581 |
| | ACGGATTGGAATCGAATGGAACGGAATGGAATGGA | |
| | ATGGACAT | |
| TEE-572 | TACAAACTTTAAAAAATGATCAACAGATACACAGTT | 5582 |
| | AGCAAGAAAGAATTGAGGGCAAAGAATATGCCAGA | |
| | CAAACTCAAGAGGAAGATGATGGTAGAGATAGGTCA | |
| | CATTGGAGTGTCA | |
| TEE-573 | AAATCAACAACAAACGGAAAAAAAAGGAATTATCG | 5583 |
| | AATGGAATCAAAGAGAATCATCGAATGGACC | |
| TEE-574 | AACGGAATCAAACGGAATTATCGAATGGAATCGAAA | 5584 |
| | AGAATCATCGAACGGACTCGAATGGAATCATCTAAT | |
| | GTAATGGAATGGAAGAATCCATGGACTCGAATG | |
| TEE-575 | AACGGAAAAAAACGGAATTATCGAATGGAATCGAA | 5585 |
| | GAGAATCATCGAATGGACCAGAATGGAATCATCTAA | |
| | TGGAATGGAATGGAATAATCCATGGACTCGAATG | |
| TEE-576 | CAACATCAAACGGAAAAAAACGGAATTATGGAATG | 5586 |
| | GAATCGAAGAGAATCATCGAATGGACCCGAATGGAA | |
| | TCATCTGAAATATAATAGACTCGAAAGGAATG | |
| TEE-577 | ATGGAATCGAATGGAATGGACTGGAATGGAATGGAT | 5587 |
| | TCGAATGGAATCGAATGGAACAATATGGAATGGTAC | |
| | CAAATG | |
| TEE-578 | GAATGGAATCAACATCAAACGGAAAAAAACGGAAT | 5588 |
| | TATCGAATGGAATCGAAGAGAATCATCGAATGGACC | |
| TEE-579 | AAATGGACTCGAATGGAATCATCATAGAATGGAATC | 5589 |
| | GAATGCAATGGAATGGAATCTTCCGGAATGGAATGG | |
| | AATGGAATGGAATGGAG | |
| TEE-580 | GAATCATCATAAAATGGAATCGAATGGAATCAACAT | 5590 |
| | CAAATGGAATCAAATGGAATCATTGAACGGAATTGA | |
| | ATGGAATCGTCAT | |
| TEE-581 | ATCGAATGGAATCAACATCAAACGGAAAAAAACGG | 5591 |
| | AATTATCGAATGGAATCGAAGAGAATCATCGAATGG | |
| | ACC | |
| TEE-582 | AGCAACTTCAGCAAAGTCTCAGGATACAAAATCAAT | 5592 |
| | GTACAAAAATCACAAGCATTCTTATACACCAATAAC | |
| | AGACAAACAGAGAGCCAAAA | |
| TEE-583 | AGAAACAGAAAACAGTCAAACCAATGGGCAATCCAT | 5593 |
| | ATCAGATGCAGTATTATGAACAGAAGTGTAAAGAAT | |
| | GCACCAGGCACAATGGC | |
| TEE-584 | GATTGGAACGAAATCGAATGGAACGGAATAGAATA | 5594 |
| | GACTCGAATGTAATGGATTGCTATGTAATTGATTCGA | |
| | ATGGAATGGAATCGAATGGAATGCAATCCAATGGAA | |
| | TGGAATGCAATGCAATGGAATGG | |
| TEE-585 | ATGGAATGGAATAATCAACGTACTCGAATGCAATCA | 5595 |
| | TCATCGTATAGAATCGAATGGAATCATCGAATGGAC | |
| | TCGAATGGAATAATCATTGAACGGAGTCGAATGGAA | |
| | TCATCATCGGATGGAAAC | |
| TEE-586 | AAAGAAATCGAATGGAATCAGTGTCGAATGGAATGG | 5596 |
| | AATGGAATCGAAGAATTGAATTGAGTAGAATCGAAG | |
| | GGAATCATTGGATGGGCTCAAAT | |
| TEE-587 | AGAAAAGATAACTCGATTAACAAATGAACAAACACC | 5597 |
| | TGAATACACAAGTCTCAAAAGAAGACATAAAAATGG | |
| | CCAAC | |
| TEE-588 | ATGGAATCAACATCAAACGGAATCACACGGAATTAT | 5598 |
| | CGAATGGAATCGAAAAGAATCATCGAACGGACTCGA | |
| | ATGGAATCATCTAATGGAATGGAATGGAAG | |
| TEE-589 | AATGGAATCAACATCAAACGGAATCAAGCGAAATTA | 5599 |
| | TCGAATGGAATCGAAGAGAATCATCGAATGGACTCG | |
| | AATGGAATCATCTAATGGAATGGAATGGGAT | |
| TEE-590 | AAACACAGTACAAATACTAATTCAAATCAAACTTAC | 5600 |
| | TCAAAGTCATAATCAAACATGCCAGACGGGCTGAGG | |
| | GGCAGCATTA | |
| TEE-591 | GGAATCGAGTGGAATCATCGAAAGAAATCGAATGGA | 5601 |
| | ATCATTGTCGAATGGAATGGAATGGAATCAAAGAAT | |
| | GGAATCGAAGGGAATCATTGGATGGGCT | |
| TEE-592 | AAAGAAAGACAGAGAACAAACGTAATTCAAGATGA | 5602 |
| | CTGTTTACATATCCAAGAACATTAGATGGTCAAAGA | |
| | CTTTAAGAAGGAATACATTCAAAGGCAAAAAGTCAC | |
| | TTACTGATTTTGGTGGAGTTTGCCACATGGAC | |
| TEE-593 | GAAAGGAATCATCATTGAATGCAATCACATGGAATC | 5603 |
| | ATCACAGAATGGAATCGTACGGAATCATCATCGAAT | |
| | GGAATTGAATGGAATCATCAATTGGACTCGAATGGA | |
| | ATCATCAAATGGAATCGATTGGAAGTGTCAAATGGA | |
| | CTCG | |
| TEE-594 | CAATCAGAGCGGACACAAACAAATTGCATGGGAAG | 5604 |
| | AATCAATATCGTGAAAATGGCC | |
| TEE-595 | CAGCGCACCACAGCACACACAGTATACACATGACCC | 5605 |
| | ACAATACACACAACACACAACACATTCACACACCAC | |
| TEE-596 | GCAAACAGAATTCAACACTACATTAGAACGATCATT | 5606 |
| | CATCACGACCTAGTAGGATGTTTTTCCTGGGATGCAA | |
| | GGATGGTTCAACAT | |
| TEE-597 | CAATCAAAACAGCAATGAGATACCATTTTACACCAA | 5607 |
| | TCAAAATGGCTACTAAAAAGTCAAAAGCAAATGCC | |
| TEE-598 | TGGAATAGAATGGAATCAATGTTAAGTGGAATCGAG | 5608 |
| | TGGAATCATCGAAAGAAATCGAATGGAATCATTGTC | |
| | GAATGGTATGGAATGGAATCA | |
| TEE-599 | AATGGAATGGAATCATCGCATAGAATGGAATGGAAT | 5609 |
| | TATCATCGAATTGAATCGAATGGTATCAACATCAAA | |
| | CGGAAAAAAACGGAAATATCGAATGGAATCGAAGA | |
| | GAATCATCGAACGGACC | |
| TEE-600 | GAAAAACAAAACAAAACAAACAAACAAACAATCAA | 5610 |
| | AAAAGTGGTAGCAGAAACCAGAAAGTCCATGTATAT | |
| | AGCTAATTGGCCTGGTTGT | |
| TEE-601 | AGACCTTTCTCAGAAGACACACAAATTGCCAACAGG | 5611 |
| | TATATGAAAAAATGTTCAATATCACTAATCATCAGG | |
| | GCGATGCC | |
| TEE-602 | CATGGAATCGAATGGAATTATCATCGAATGGAATCG | 5612 |
| | AATGGTACCAACACCAAACGGAAAAAAACGGAATT | |
| | ATCGAATGGAATCGAAGAGAATCTTCGAACGGACC | |
| TEE-603 | AGAGCAGAAACAAATGGAATTGAAATGAAGACAAC | 5613 |
| | AATCAAAAGCATCAATGAAATGAAAAGTTGGGTTTT | |
| | GGAAGAGAGAAACAAT | |
| TEE-604 | ACACAAACACACACACACACACACACACACACACAC | 5614 |
| | ACACACACACACACACACACACACACACACATAC | |
| TEE-605 | AACAAACAAATGAGATGATTTCAGATAGTGATAAAC | 5615 |
| | ACTATAACATAATTAATTCGTGCCAATCAGAGCATA | |
| | ACAGTGGTGTGGTGGCTGTGGAACAGATAGCAGAC | |
| TEE-606 | AATGGAATCGAGTGGAATGGAAGGCAATGGAATAG | 5616 |
| | AATGGAATGGAATCGAAAGGAACGGAATGGAATGG | |
| | AATGGAATG | |
| TEE-607 | AGAAATGGAATCGGAGAGAATGGAAACAAATGGAA | 5617 |
| | TGGAATTGAATGGAATGGAATTGAATGGAATGGGAA | |
| | CG | |
| TEE-608 | AAGAGAACTGCAAAACACTGCTCAAAGAAATCAGA | 5618 |
| | GATGACAAAAACACATGGAAAAACGTTTCATGCTCA | |
| | TGGATTGGAAGACTTA | |
| TEE-609 | AATCAACACGAATAGAATGGAACGGAATGGAATGG | 5619 |
| | AATGGAATGGAATGGAATGGAGTGGAATGGAACAG | |
| | AATGGAGTGGAAT | |
| TEE-610 | AACATCAAACGAAATCAAACGGAATTATCAAATTGA | 5620 |
| | ATCGAAGAGAATCATCGAATTGCCACGAATGCAACC | |
| | ATCTAATGGTATGGAATGGAATAATCCATGGACCCA | |
| | GATG | |
| TEE-611 | CGGAATTATCATCGAATGTAATCGAATGGAATCAAC | 5621 |
| | ATCAAACGGAAAAAAACGGAATTATCGAATGGAATC | |
| | GAAGAGAATCATCGAATGGACC | |
| TEE-612 | TGGACACACACGAACACACACCTACACACACGTGGA | 5622 |
| | CACACACGGACACATGGACACACACGAACACATGGA | |
| | CACACACACGGGGACACACACAGACACACACAGAG | |
| | ACACACACGGACACATGG | |
| TEE-613 | ATCAAACGGAATCAAACGGAATTATCGAATGGAATC | 5623 |
| | GAAGAGAATCATCGAATGGACTCGAATGGAATCATC | |
| | TAATGGAATGGAATGGAAGAATCCATGG | |
| TEE-614 | AAATGGAATGGAATGCACTTGAAAGGAATAGACTGG | 5624 |
| | AACAAAATGAAATCGAACGGTAGGAATCATACAGA | |
| | ACAGAAAGAAATGGAACGGAATGGAATG | |
| TEE-615 | ACCACACACAAAATACACCACACACCACACACACAC | 5625 |
| | CACACACTATACACACACCACACACCACACAC | |
| TEE-616 | AAAGAAATAGAAGGGAGTTGAACAGAATCGAATGG | 5626 |
| | AATCGAATCAAATGGAATCGAATGGCATCAAATGGA | |
| | ATCGAATGGAATGTGGTGAAGTGGATTGG | |
| TEE-617 | GGAATCATCATAAAATGGAATCGAATGGAATCATCA | 5627 |
| | TCAAATGGAATCAAATGGAATCATTGAACGGAATTG | |
| | AATGGAATCGTCAT | |
| TEE-618 | AAAGATCAATGTACAAAAATCAGCAGCATTTCTATA | 5628 |
| | AACCAACAATGTCCAGGCTGAGAGAGAAATCAAGA | |
| | AAACAATTC | |
| TEE-619 | TGGAATGGAATGGAATGAAATAAACACGAATAGAAT | 5629 |
| | GGAACGGAATGGAACGGAATGGAATGGAATGGAAT | |
| | GGAAAG | |
| TEE-620 | TAATCAGCACAATCAACTGTAGTCACAAAACAAATA | 5630 |
| | GTAACGCAATGATAAAGAAACAGAGAACTAGTTCAA | |
| | ATAAACATGATAAGATGGGG | |
| TEE-621 | AAGCGGAATTATCAAATGGAATCGAAGAGAATGGA | 5631 |
| | AACAAATGGAATGGAATTGAATGGAATGGAATTGAA | |
| | TGGAATG | |
| TEE-622 | AATGGAATCAACATCAAACGGAAAAAAACGGAATT | 5632 |
| | ATCGAATGGAATCGAAGAGAATCATCGAATGGACC | |
| TEE-623 | ACTTGAATCGAATGGAAAGGAATTTAATGAACTTAA | 5633 |
| | ATCGAATGGAATATAATGGTATGGAATGGACTCATG | |
| | GAATGGAATGGAAAGGAATC | |
| TEE-624 | TGGAATCATCATCGAAAGCAAGCGAATGGAATCATC | 5634 |
| | AAATGGAAACGAATGGAATCATCGAATGGACTCGGA | |
| | TGGAATTGTTGAATGGACT | |
| TEE-625 | TGGAATCAACATCAAACGGAAAAAAACGGAATTATC | 5635 |
| | GAATGGAATCGAAGAGAATCATCGAATGGACC | |
| TEE-626 | TAAGTGAATTGAATAGAATCAATCTGAATGTAATGA | 5636 |
| | AATGGAATGGAACGGAATGGAATGGAATGGAATGG | |
| | AATGGAATGGAATGG | |
| TEE-627 | AGGAAAATTTAATCAGCAGGAATAGAAACACACTTG | 5637 |
| | AGAAATCCATGTGGAATGAAAAGAGAATGGCTGAGC | |
| | AGCAACAGATTGTCAAAAAGGAAATC | |
| TEE-628 | AACATCAAACGGAAAAAAAACGGAATTATCGAATG | 5638 |
| | GAATCGAAGAGAATCATCGAATGGACC | |
| TEE-629 | TAATTGAGAATAAGCATTCCAGTGGAAAAAAAACTA | 5639 |
| | AACAATTTGTTGTAAAACATCCTTAAAAGCATCAGA | |
| | AAGTTAATACAGCAATGAAGAATTACAGGACCAAAT | |
| | TAAGAATGGTATGGAAGCCTGTTA | |
| TEE-630 | TATCATCGAATGGAATCGAATGGAATCAACATCAAA | 5640 |
| | CGGAAAAAAACGGAATTATCGAATTGAATCGAAGAG | |
| | AATCATCGAATGGACC | |
| TEE-631 | AGCAAAACAAACACAATCTGTCGTTCATGGTACTAC | 5641 |
| | GACATACTGGGAGAGATATTCAAATGATCACACAAA | |
| | ACAACATG | |
| TEE-632 | AAGGATTCGAATGGAATGAAAAAGAATTGAATGGA | 5642 |
| | ATAGAACAGAATGGAATCAAATCGAATGAAATGGA | |
| | GTGGAATAGAAAGGAATGGAATG | |
| TEE-633 | AACGGAATCAAACGGAATTATCGAATGGAATCGAAG | 5643 |
| | AGAATCATCGAACGGACTCGAATGGAATCATCTAAT | |
| | GGAATGGAATGGAAGAATCCATGGACTCGAATGCAA | |
| | TCATCATCGAATGGAATCGAACGGAATCATCGAATG | |
| | GCC | |
| TEE-634 | AATCAACTAGATGTCAATGGAATGCAATGGAATAGA | 5644 |
| | ATGGAATGGAATTAACACGAATAGAATGGAATGGAA | |
| | TGGAATGGAATGG | |
| TEE-635 | AATGGACTCGAATGGAATAATCATTGAACGGAATCG | 5645 |
| | AATGGAATCATCATCGGATGGAAATGAATGGAATCA | |
| | TCATCGCATGGAATCG | |
| TEE-636 | GAATGGAATGATACGGAATAGAATGGAATGGAACG | 5646 |
| | AAATGGAATTGAAAGGAAAGGAATGGAATGGAATG | |
| | GAATGG | |
| TEE-637 | AATCATCATCGAATGGAATCGAATGGTATCATTGAG | 5647 |
| | TGGAATCGAATGGAATCATCATCAGATGGAAATGAA | |
| | TGGAATCGTCAT | |
| TEE-638 | GAATCAAATCAATGGAATCAAATCAAATGGAATGGA | 5648 |
| | ATGGAATTGTATGGAATGGAATGGCATGG | |
| TEE-639 | TAATGCAGTCCAATAGAATGGAATCGAATGGCATGG | 5649 |
| | AATATAAAGAAATGGAATCGAAGAGAATGGGAACA | |
| | AATGGAATGGAATTGAGTGGAATGGAATTGAATGGA | |
| | ATGGGAACGAATGGAGTG | |
| TEE-640 | AACATCAAACGGAAAAAAACGGAATTATCGAATGG | 5650 |
| | AATCGAAGAGAATCATCGAATGGACC | |
| TEE-641 | ATCAAAAGGAACGGAATGGAATGGAATGGAATGGA | 5651 |
| | ATGGAATGGAATGGAATGGAATGAAATCAACCCGAA | |
| | TGGAATGGATTGGCATAGAGTGGAATGG | |
| TEE-642 | GCCAACAATCATATGAGAAAAAGCTCAACATCACTG | 5652 |
| | ATCATTTCAGGAATGCAAATCAAAACCACAATGAGA | |
| | TACTATCA | |
| TEE-643 | AATCAAATGGAATGAAATCGAATGGAATTGAATCGA | 5653 |
| | ATGGAATGCAATAGAATGTCTTCAAATGGAATCGAA | |
| | TGGAAATTGGTGAAGTGGACGGGAGTG | |
| TEE-644 | TAATGGAATCAACATCAAACGGAAAAAAACGGAATT | 5654 |
| | ATCGAATGCAATCGAAGAGAATCATCGAATGGACC | |
| TEE-645 | AGCAACTTCAGCAAAGTCTCAGCATACAAAATCAAT | 5655 |
| | GTGCAAAAATCACACGCATTCCTATACACCAATAAC | |
| | AGACAAACAGAGAGCC | |
| TEE-646 | GAATCAAATGGAATGGACTGTAATGGAATGGATTCG | 5656 |
| | AATGGAATCGAATGGAGTGGACTCAAATGGAATG | |
| TEE-647 | AACAAGTGGACGAAGGATATGAACAGACACTTCTCA | 5657 |
| | AGACATTTATGCAGCCAACAGACACACGAAAAAATG | |
| | CTCATCATCACTGGCCATCAG | |
| TEE-648 | AAACGGAAAAAAACGGAATTATCGAATGGAATCGA | 5658 |
| | ATAGAATCATCGAATGGACC | |
| TEE-649 | TGGAACCGAACAAAGTCATCACCGAATGGAATTGAA | 5659 |
| | ATGAATCATAATCGAATGGAATCAAATGGCATCTTC | |
| | GAATTGACTCGAATGCAATCATCCACTGGGCTT | |
| TEE-650 | AACGGAATCACGCGGAATTATCGAATGGAATCGAAG | 5660 |
| | AGAATCATCGAATGGACTCGAATGGAATCATCTAAT | |
| | GGAATGGAATGG | |
| TEE-651 | GGAATCAACTCGATTGCAATGGAATGCAATGGAAAG | 5661 |
| | GAATGGAATGCAATTAAAGCGAATAGAATGGAATGG | |
| | AATGGAATGGAACGGAATGGAATG | |
| TEE-652 | AAAACAAACAACAACGACAAATCATGAGACCAGAG | 5662 |
| | TTAAGAAACAATGAGACCAGGCTGGGTGTGGTG | |
| TEE-653 | AATCGAAAGGAATGCAATATTATTGAACAGAATCGA | 5663 |
| | AAAGAATGGAATCAAATGGAATGGAACAGAGTGGA | |
| | ATGGACTGC | |
| TEE-654 | AAGGAATCGAATGGAAGTGAATGAAATTGAATCAAC | 5664 |
| | AGGAATGGAAGGGAATAGAATAGACTGTAATGGAA | |
| | TGGACTCG | |
| TEE-655 | AACCCGAGTGCAATAGAATGGAATCGAATGGAATGG | 5665 |
| | AATGGAATGGAATGGAATGGAATGGAGTC | |
| TEE-656 | GAATGGAATTGAAAGGAATGGAATGCAATGGAATG | 5666 |
| | GAATGGGATGGAATGGAATGCAATGGAATCAACTCG | |
| | ATTGCAATG | |
| TEE-657 | GAAAAAAACGGAATTATCGAATTGAATCAAATAGAA | 5667 |
| | TCATCGAACGGACCAAAATGGAATCATCTAATGGAA | |
| | TGGAATGGAATAATCCATGGACTCTAATG | |
| TEE-658 | TGGAATCATCTAATGGAATGGAATGGAATAATCCAT | 5668 |
| | GGACTCGAATGCAATCATCATAAAATGGAATCGAAT | |
| | GGAATCAACATCAAATGGAATCAAATGGGATCATTG | |
| | AACGGAATTGAATGGAATCGTCAT | |
| TEE-659 | GAAAAAAACGGAATTATCGAATTGAATCGAATAGAA | 5669 |
| | TCATCGAACGGACCAGAATGGAATCATCTAATGGAA | |
| | TGGAATGGAATAATCCATGGACTCGAATG | |
| TEE-660 | AACCACTGCTTAAGGAAATAAGAGAGAACACAAAC | 5670 |
| | AAATGGAAAAACGTTCCATGCTCATGGATAGGAGAA | |
| | TCAATATCGTGAAAATGGCC | |
| TEE-661 | TATCGAATGGAATGGAAAGGAGTGGAGTAGACTCGA | 5671 |
| | ATAGAATGGACTGGAATGAAATAGATTCGAATGGAA | |
| | TGGAATGGAATGAAGTGGACTCG | |
| TEE-662 | GTATCAACATCAAACGGAAAAAAACGGAATTATCGA | 5672 |
| | ATGGAATCATCTAATGGAATGGAATGGAATAATCCA | |
| | TGGACTCGAATG | |
| TEE-663 | TAAATGGAGACATCATTGAATACAATTGAATGGAAT | 5673 |
| | CATCACATGGAATCGAATGGAATCATCGTAAATGCA | |
| | ATCAAGTGGAATCAT | |
| TEE-664 | GAATGGAATTGAAAGGTATCAACACCAAACGGAAA | 5674 |
| | AAAAAACGGAATTATCGAATGGAATCGAAGAGAATC | |
| | ATCGAACGGACC | |
| TEE-665 | AGCAATTTCAGCAAAGTCTCAGGATACAAAATCAAT | 5675 |
| | GTACAAATTCACAAGCATTCTTATGGACCAACAACAG | |
| TEE-666 | GGAATCGAATGGCATCAACATCAAACGGAAAAAAA | 5676 |
| | CGGAATTATCGAATGGAATCGAATGGAATCATC | |
| TEE-667 | AAACAAAACACAGAAATGCAAAGACAAAACATAAA | 5677 |
| | ACGCAGCCATAAAGGACATATTTTAGATAACTGGGG | |
| | AAATTTGTATGGGCTGTGT | |
| TEE-668 | AATGGAATCAACATCAAACGGAATCAAACGGAATTA | 5678 |
| | TCGAATGGAATCGAAGAGAATCATCGAACGGACTCG | |
| | AATGGAATCATCTAATGGAATGGAATGGAAG | |
| TEE-669 | AATCGAATGGAATCAGCATCAAACGGAAAAAAACG | 5679 |
| | GAATTATCGAATGGAATCGAAGAGAATCATCGAATG | |
| | GACC | |
| TEE-670 | AAACGGAATTATAGAATGGACTGGAAGAGAATCATC | 5680 |
| | GAACGGACTAGAATGGAATCATCTAATCGAATGGAA | |
| | TGGAACAATCCATGGTCTAGCA | |
| TEE-671 | TGAACAGAGAATTGGACAAAACGCACAAAGTAAAG | 5681 |
| | AAAAAGAATGAAGCAACAAAAGCAGAGATTTATTG | |
| | AAAACAAAAGTACACACCACACAGGGTGGGAGTGG | |
| TEE-672 | ATCATAACGACAAGAACAAATTCACACACAACAATA | 5682 |
| | TTAACTTCAAATCCAAATGGGTTAAATGCTCCAATTA | |
| | AAGGATGCAGACGGGCAAATTGGATA | |
| TEE-673 | ATCATAACGACAAGAACAAATTCACACACAACAATA | 5683 |
| | TTCACTTCAAATCCAAATGGGTTAAATGCTCCAATTA | |
| | AAGGATGCAGACGGGCAAATTGGATA | |
| TEE-674 | GAATGGAATCGAATGGATTGATATCAACTGGAATGG | 5684 |
| | AATGGAAGGGAATGGAATGGAATGGAATTGAACCA | |
| | AATGTAATGACTTGAATGGAATG | |
| TEE-675 | GAATCAACATCAAACGGAAAAAAACGGAATTATCGA | 5685 |
| | ATGGAATCGAAGAGAATCATCGAATGGACC | |
| TEE-676 | GGAATCAACATCAAACGGAAAAAAACGGAATTATCG | 5686 |
| | AATGGAATCGAAGAGAATCATCGAATGGACC | |
| TEE-677 | ATGGAATCAACATCAAACGGAATCAAACGGAATTAT | 5687 |
| | CGAATGGAATCAAAGAGAATCATCGAACGGACTCGA | |
| | ATGGAATCATCTAATGGAATGGAATGGAAGAATCCA | |
| | TGGACTCGAATGCAATCATCATCGAAT | |
| TEE-678 | GGAATGGAATGGAATGGAGCCGAATGGAATGGAAT | 5688 |
| | GTACTCAAATGGAATGC | |
| TEE-679 | AAAACACCTAGGAATACAGATAACAAGGGACATTAA | 5689 |
| | CTACCTCTTAAAGAGAACTACAAACCACTGCTCAAG | |
| | GAAATGAGAGAGGACACAAACACATGGAAAAACAT | |
| | TCCATCCTCATGGATAGGAAGAATCAATATTGTGAA | |
| | AATGGCC | |
| TEE-680 | AACACGACTTTGAGAAGAGTAAGTGATTGTTAATTA | 5690 |
| | AAGCAAGAGAATTATTGATGTATCACAGTCATGAGA | |
| | AATATTGGAAGGAATATGGTCCATAC | |
| TEE-681 | ACACATATCAAACAAACAAAAGCAATTGACTATCTA | 5691 |
| | GAAATGTCTGGGAAATGGCAAGATATTACA | |
| TEE-682 | GGAATCATCATATAATGGAATCGAATGGAATCAACA | 5692 |
| | TCAAATGGAATCAAATGGAATCATTGAACGGAATTG | |
| | AATGGAATCGTCAT | |
| TEE-683 | AATGGAATCAACATCAAACGGAATCAAATGGAATTA | 5693 |
| | TCGAATGGAATCGAAGAGAATCATCGAATTGTCACG | |
| | AATGGAATCATCTAATGGAATGGAATGGAATAATCC | |
| | ATGGCCCCTATGCAATGGACTCGAATGAAATCATCA | |
| | TCAAACAGAATCGAATGGAATCATCTAATGGAATGG | |
| | AATGGCATAATCCATGGACTCGAATG | |
| TEE-684 | TAAAATGAAACAAATATACAACACGAAGGTTATCAC | 5694 |
| | CAGAAATATGCCAAAACTTAAATATGAGAATAAGAC | |
| | AGTCTCAGGGGCCACAGAG | |
| TEE-685 | AAAATACAGCGTTATGAAAAGAATGAACACACACAC | 5695 |
| | ACACACACACACACAGAAAATGT | |
| TEE-686 | CAAACAAATAGGTACCAAACAAATAACAACATAAAC | 5696 |
| | CTGACAACACACTTATTTACAAGAGACATCCCTTATA | |
| | TGAAAGGGTACAGAAAAGTCGATGGTAAGATGATGG | |
| | GGAAAGGTATACCAACCACTAGCAGAAGG | |
| TEE-687 | TGGAATCGAATGGAATCAATATCAAACGGAAAAAAA | 5697 |
| | CGGAATTATCGAATGGAATCGAAAAGAATCATCGAA | |
| | TGGGCCCGAATGGAATCATCT | |
| TEE-688 | ACAAATGGAATCAACAACGAATGGAATCGAATGGA | 5698 |
| | AACGCCATCGAAAGGAAACGAATGGAATTATCATGA | |
| | AATTGAAATGGATG | |
| TEE-689 | AATCAATAAATGTAAACCAGCATATAAACAGAACCA | 5699 |
| | ACGACAAAAACCACATGATTATCTCAATAGATGCAG | |
| | AAAAGGCC | |
| TEE-690 | AAAATAAACGCAAATTAAAATCACAAGATACCAACA | 5700 |
| | CATTCCCACGGCTAAGTACGAAGAACAAGGGCGAAT | |
| | GGTCAGAATTAAGCTCAAACCT | |
| TEE-691 | CAACATCAAACGGAATCAAACGGAATTATCGAATGG | 5701 |
| | AATCGAAGAGAATCATCGAATGGACTCGAATGGAAT | |
| | CATCTAATGGAATGGAATGGAAG | |
| TEE-692 | ACATCAAACGGAAAAAAACGGAATTATCGAATGGA | 5702 |
| | ATCGAAGAGAATCATCGAATGGACC | |
| TEE-693 | AATGGACTCGAATAGAATTGACTGGAATGGAATGGA | 5703 |
| | CTCGAATGGAATGGAATGGAATGGAAGGGACTCG | |
| TEE-694 | AAGAAAGACAGAGAACAAACGTAATTCAAGATGAC | 5704 |
| | TGATTACATATCCAAGAACATTAGATGGTCAAAGAC | |
| | TTTAAGAAGGAATACATTCAAAGGCAAAACGTCACT | |
| | TACTGATTTTGGTGGAGTTTGCCACATGGAC | |
| TEE-695 | GAATGGAATCGAATGGAATGAACATCAAACGGAAA | 5705 |
| | AAAACGGAATTATCGAATGGAATCAAAGAGAATCAT | |
| | CGAATGGACCCG | |
| TEE-696 | ATGGACTCGAATGTAATAATCATTGAACGGAATCGA | 5706 |
| | ATGGAATCATCATCGGATGGAAACGAATGGAATCAT | |
| | CATCGAATGGAATCGAATGGGATC | |
| TEE-697 | GAAATGGAATGGAAAGGAATAAAATCAAGTGAAAT | 5707 |
| | TGGATGGAATGGATTGGAATGGATTGGAATG | |
| TEE-698 | AAACGGAAAAAAAACGGAATTATCGAATGGAATCG | 5708 |
| | AAGAGAATCATCGAACGAACCAGAATGGAATCATCT | |
| | AATGGAATGGAATGGAATAATCCATGG | |
| TEE-699 | ATTAACCCGAATAGAATGGAATGGAATGGAATGGAA | 5709 |
| | CGGAACGGAATGGAATGGAATGGAATGGAATGGAA | |
| | TGGATCG | |
| TEE-700 | AACATCAAACGGAAAAAAACGGAATTATCGTATGGA | 5710 |
| | ATCGAAGAGAATCATCGAATGGACC | |
| TEE-701 | GAATAGAATTGAATCATCATTGAATGGAATCGAGTA | 5711 |
| | GAATCATTGAAATCGAATGGAATCATCATCGAATGG | |
| | AATTGGGTGGAATC | |
| TEE-702 | CACCGAATAGAATCGAATGGAACAATCATCGAATGG | 5712 |
| | ACTCAAATGGAATTATCCTCAAATGGAATCGAATGG | |
| | AATTATCG | |
| TEE-703 | AATGCAATCGAATAGAATCATCGAATAGACTCGAAT | 5713 |
| | GGAATCATCGAATGGAATGGAATGGAACAGTC | |
| TEE-704 | AAATCATCATCGAATGGAATCGAATGGTATCATTGA | 5714 |
| | ATGGAATCGAATGGAATCATCATCAGATGGAAATGA | |
| | ATGGAATCGTCAT | |
| TEE-705 | GAATGGAATCGAAAGGAATAGAATGGAATGGATCGT | 5715 |
| | TATGGAAAGACATCGAATGGAATGGAATTGACTCGA | |
| | ATGGAATGGACTGGAATGGAACG | |

### Example 35. In Vitro Expression of Modified Nucleic Acids with miR-122

[1029] MicroRNA controls gene expression through the translational suppression and/or degradation of target messenger RNA. The expression of G-CSF mRNA and Factor IX mRNA with human or mouse alpha-globin 3′ untranslated regions (UTRs) were down regulated in human primary hepatocytes using miR-122 sequences in the 3′UTR.

[1030] Primary human hepatocytes were seeded at a density of 350000 per well in 500 μl cell culture medium (InVitro GRO medium from Celsis, Chicago, IL).

[1031] G-CSF mRNA having a human alpha-globin 3′UTR (G-CSF Hs3′UTR; mRNA sequence shown in SEQ ID NO: 5716; polyA tail of approximately 140 nucleotides not shown in sequence; 5′cap, Cap1) or a mouse alpha-globin 3′UTR (G-CSF Mm3′UTR; mRNA sequence shown in SEQ ID NO: 5717; polyA tail of approximately 140 nucleotides not shown in sequence; 5′cap, Cap1) were fully modified with 5-methylcytidine and 1-methylpseudouridine. G-CSF mRNA containing a human 3′UTR having a miR-122 sequence in the 3′UTR (G-CSF Hs3′UTR miR-122; mRNA sequence shown in SEQ ID NO: 5018; polyA tail of approximately 140 nucleotides not shown in sequence; 5′cap, Cap1), or a miR-122 seed sequence in the 3′UTR (G-CSF Hs3′UTR miR-122 seed; mRNA sequence shown in SEQ ID NO: 5020; polyA tail of approximately 140 nucleotides not shown in sequence; 5′cap, Cap1) or a miR-122 sequence without the seed sequence in the 3′UTR (G-CSF Hs3′UTR miR-122 seedless; mRNA sequence shown in SEQ ID NO: 5022; polyA tail of approximately 140 nucleotides not shown in sequence; 5′cap, Cap1) were fully modified with 5-methylcytidine and 1-methylpseudouridine. G-CSF mRNA containing a mouse 3′UTR having a miR-122 sequence in the 3′UTR (G-CSF Mm3′UTR miR-122; mRNA sequence shown in SEQ ID NO: 5024; polyA tail of approximately 140 nucleotides not shown in sequence; 5′cap, Cap1), or a miR-122 seed sequence in the 3′UTR (G-CSF Mm3′UTR miR-122 seed; mRNA sequence shown in SEQ ID NO: 5026; polyA tail of approximately 140 nucleotides not shown in sequence; 5′cap, Cap1) or a miR-122 sequence without the seed sequence in the 3′UTR (G-CSF Mm3′UTR miR-122 seedless; mRNA sequence shown in SEQ ID NO: 5028; polyA tail of approximately 140 nucleotides not shown in sequence; 5′cap, Cap1) were fully modified with 5-methylcytidine and 1-methylpseudouridine.

[1032] Factor IX mRNA having a human alpha-globin 3′UTR (Factor IX Hs3′UTR; mRNA sequence shown in SEQ ID NO: 5718; polyA tail of approximately 140 nucleotides not shown in sequence; 5′cap, Cap1) or a mouse alpha-globin 3′UTR (Factor IX Mm3′UTR; mRNA sequence shown in SEQ ID NO: 5719; polyA tail of approximately 140 nucleotides not shown in sequence; 5′cap, Cap1) were fully modified with 5-methylcytidine and 1-methylpseudouridine. Factor IX mRNA containing a human 3′UTR having a miR-122 sequence in the 3′UTR (Factor IX Hs3′UTR miR-122; mRNA sequence shown in SEQ ID NO: 5030; polyA tail of approximately 140 nucleotides not shown in sequence; 5′cap, Cap1), or a miR-122 seed sequence in the 3′UTR (Factor IX Hs3′UTR miR-122 seed; mRNA sequence shown in SEQ ID NO: 5032; polyA tail of approximately 140 nucleotides not shown in sequence; 5′cap, Cap1) or a miR-122 sequence without the seed sequence in the 3′UTR (Factor IX Hs3′UTR miR-122 seedless; mRNA sequence shown in SEQ ID NO: 5034; polyA tail of approximately 140 nucleotides not shown in sequence; 5′cap, Cap1) were fully modified with 5-methylcytidine and 1-methylpseudouridine. Factor IX mRNA containing a mouse 3′UTR having a miR-122 sequence in the 3′UTR (Factor IX Mm3′UTR miR-122; mRNA sequence shown in SEQ ID NO: 5036; polyA tail of approximately 140 nucleotides not shown in sequence; 5′cap, Cap1), or a miR-122 seed sequence in the 3′UTR (Factor IX Mm3′UTR miR-122 seed; mRNA sequence shown in SEQ ID NO: 5038; polyA tail of approximately 140 nucleotides not shown in sequence; 5′cap, Cap1) or a miR-122 sequence without the seed sequence in the 3′UTR (Factor IX Mm3′UTR miR-122 seedless; mRNA sequence shown in SEQ ID NO: 5040; polyA tail of approximately 140 nucleotides not shown in sequence; 5′cap, Cap1) were fully modified with 5-methylcytidine and 1-methylpseudouridine.

[1033] Each G-CSF or Factor IX mRNA sequence was tested at a concentration of 500 ng per well in 24 well plates. 24, 48 and 72 hours after transfection, the expression of protein was measured by ELISA. The protein levels for G-CSF are shown in Table 33 and the protein levels for Factor IX are shown in Table 34.

TABLE 33
G-CSF Protein Expression

| | Protein Expression (ng/ml) | | |
|---|---|---|---|
| Description | 24 Hours | 48 Hours | 72 Hours |
| G-CSF Hs3′UTR | 43.9 | 18.8 | 5.7 |
| G-CSF Hs3′UTR miR-122 | 6.9 | 0.7 | 0.12 |
| G-CSF Hs3′UTR miR-122 seed | 48.5 | 25.6 | 8.2 |
| G-CSF Hs3′UTR miR-122 seedless | 31.7 | 11.7 | 3.4 |
| G-CSF Mm3′UTR | 84.9 | 100.4 | 21.3 |
| G-CSF Mm3′UTR miR-122 | 24.0 | 3.03 | 0.8 |
| G-CSF Mm3′UTR miR-122 seed | 115.8 | 96.4 | 19.2 |
| G-CSF Mm3′UTR miR-122 seedless | 113.1 | 92.9 | 18.9 |

TABLE 34
Factor IX Protein Expression

| | Protein Expression (ng/ml) | | |
|---|---|---|---|
| Description | 24 Hours | 48 Hours | 72 Hours |
| Factor IX Hs3′UTR | 63.2 | 124.8 | 44.3 |
| Factor IX Hs3′UTR miR-122 | 15.9 | 4.4 | 0.4 |
| Factor IX Hs3′UTR miR-122 seed | 60.2 | 63.0 | 20.1 |
| Factor IX Hs3′UTR miR-122 seedless | 53.7 | 75.0 | 24.5 |
| Factor IX Mm3′UTR | 90.8 | 159.6 | 70.5 |
| Factor IX Mm3′UTR miR-122 | 11.8 | 5.0 | 1.0 |
| Factor IX Mm3′UTR miR-122 seed | 77.2 | 115.0 | 41.7 |
| Factor IX Mm3′UTR miR-122 | 69.3 | 123.8 | 49 |
| seedless | | | |

### Example 36. In Vitro Expression of Modified Nucleic Acid with Mir-142 or miR-146 Binding Sites

[1034] HeLa and RAW264 cells were seeded at a density of 17000 and 80000 per well respectively, in 100 μl cell culture medium (DMEM+10% FBS).

[1035] G-CSF mRNA (G-CSF; mRNA sequence shown in SEQ ID NO: 4258; polyA tail of approximately 140 nucleotides not shown in sequence; 5′cap, Cap1) was fully modified with 5-methylcytidine and 1-methylpseudouridine.

[1036] G-CSF mRNA having a miR-142-3p sequence in the 3′UTR (G-CSF miR-142-3p; mRNA sequence shown in SEQ ID NO: 4992; polyA tail of approximately 140 nucleotides not shown in sequence; 5′cap, Cap1), or a miR-142-3p seed sequence in the 3′UTR (G-CSF miR-142-3p seed; mRNA sequence shown in SEQ ID NO: 4994; polyA tail of approximately 140 nucleotides not shown in sequence; 5′cap, Cap1) or a miR-142-3p sequence without the seed sequence in the 3′UTR (G-CSF miR-142-3p seedless; mRNA sequence shown in SEQ ID NO: 4996; polyA tail of approximately 140 nucleotides not shown in sequence; 5′cap, Cap1) were fully modified with 5-methylcytidine and 1-methylpseudouridine.

[1037] G-CSF mRNA having a miR-142-5p sequence in the 3′UTR (G-CSF miR-142-5p; mRNA sequence shown in SEQ ID NO: 4986; polyA tail of approximately 140 nucleotides not shown in sequence; 5′cap, Cap1), or a miR-142-5p seed sequence in the 3′UTR (G-CSF miR-142-5p seed; mRNA sequence shown in SEQ ID NO: 4988; polyA tail of approximately 140 nucleotides not shown in sequence; 5′cap, Cap1) or a miR-142-5p sequence without the seed sequence in the 3′UTR (G-CSF miR-142-5p seedless; mRNA sequence shown in SEQ ID NO: 4990; polyA tail of approximately 140 nucleotides not shown in sequence; 5′cap, Cap1) were fully modified with 5-methylcytidine and 1-methylpseudouridine.

[1038] G-CSF mRNA having a miR-146a sequence in the 3′UTR (G-CSF miR-146a; mRNA sequence shown in SEQ ID NO: 4998; polyA tail of approximately 140 nucleotides not shown in sequence; 5′cap, Cap1), or a miR-146a seed sequence in the 3′UTR (G-CSF miR-146a seed; mRNA sequence shown in SEQ ID NO: 5000; polyA tail of approximately 140 nucleotides not shown in sequence; 5′cap, Cap1) or a miR-146a sequence without the seed sequence in the 3′UTR (G-CSF miR-146a seedless; mRNA sequence shown in SEQ ID NO: 5002; polyA tail of approximately 140 nucleotides not shown in sequence; 5′cap, Cap1) were fully modified with 5-methylcytidine and 1-methylpseudouridine.

[1039] Each G-CSF mRNA sequence was tested at a concentration of 500 ng per well in 24 well plates for each cell type. 24 hours after transfection, the expression of protein was measured by ELISA and the protein levels are shown in Table 35. The G-CSF sequences with a miR-142-3p sequence in the 3′UTR down regulated G-CSF expression in RAW264 cells whereas the G-CSF sequences with a miR-142-5p or miR-146a sequence in the 3′UTR did not down regulate G-CSF expression.

TABLE 35
G-CSF Expression

| | HeLa Cells | RAW264 Cells |
|---|---|---|
| | Protein Expression | Protein Expression |
| Description | (ng/ml) | (ng/ml) |
| G-CSF | 243.5 | 173.7 |
| G-CSF miR-142-3p | 309.1 | 67.6 |
| G-CSF miR-142-3p seed | 259.8 | 178.1 |
| G-CSF miR-142-3p | 321.7 | 220.2 |
| seedless | | |
| G-CSF miR-142-5p | 291.8 | 223.3 |
| G-CSF miR-142-5p seed | 261.3 | 233.1 |
| G-CSF miR-142-5p | 330.2 | 255.1 |
| seedless | | |
| G-CSF miR-146a | 272.6 | 125.2 |
| G-CSF miR-146a seed | 219.4 | 138.3 |
| G-CSF miR-146a seedless | 217.7 | 132.8 |

### Example 37. Effect of Kozak Sequence on Expression of Modified Nucleic Acids

[1040] HeLa cells were seeded at a density of 17000 per well in 100 μl cell culture medium (DMEM+10% FBS). G-CSF mRNA having an IRES sequence and Kozak sequence (G-CSF IRES Kozak; mRNA sequence shown in SEQ ID NO: 5004; polyA tail of approximately 140 nucleotides not shown in sequence; 5′cap, Cap1), G-CSF mRNA having an IRES sequence but not a Kozak sequence (G-CSF IRES; mRNA sequence shown in SEQ ID NO: 5006; polyA tail of approximately 140 nucleotides not shown in sequence; 5′cap, Cap1), G-CSF mRNA without an IRES or Kozak sequence (GCSF no Kozak; mRNA sequence shown in SEQ ID NO: 5008; polyA tail of approximately 140 nucleotides not shown in sequence; 5′cap, Cap1) or a G-CSF sequence having a Kozak sequence (G-CSF Kozak; mRNA sequence shown in SEQ ID NO: 5720; polyA tail of approximately 140 nucleotides not shown in sequence; 5′cap, Cap1) were fully modified with fully modified with 5-methylcytidine and 1-methylpseudouridine and tested at a concentration of 75 ng per well in 24 well plates. 24 hours after transfection, the expression of G-CSF was measured by ELISA, and the results are shown in Table 36.

TABLE 36
G-CSF expression

| Description | Protein Expression (ng/ml) |
|---|---|
| G-CSF IRES Kozak | 2.01 |
| G-CSF IRES | 1.64 |
| G-CSF no Kozak | 795.53 |
| G-CSF Kozak | 606.28 |

### Example 38. MALAT1 Constructs

[1041] Modified mRNA encoding G-CSF or mCherry with a human or mouse MALAT1 sequence and their corresponding cDNA sequences are shown below in Table 37. In Table 37, the start codon of each sequence is underlined and the MALAT1 sequences are bolded.

TABLE 37
MALAT1 Constructs

| | Sequence | SEQ ID NO: |
|---|---|---|
| G-CSF | Optimized G-CSF cDNA sequence containing | 5721 |
| with | a T7 polymerase site, kozak sequence, | |
| Mouse | and a Mouse MALAT1 sequence (bold): | |
| MALAT1 | TAATACGACTCACTATA | |
| sequence | GGGAAATAAGAGAGAAAAGAAGAGTAAGAAGAAATA | |
| | TAAGAGCCACC | |
| | ATGGCCGGTCCCGCGACCCAAAGCCCCATGAAACTTA | |
| | TGGCCCTGCAGTTGCTGCTTTGGCACTCGGCCCTCTGG | |
| | ACAGTCCAAGAAGCGACTCCTCTCGGACCTGCCTCAT | |
| | CGTTGCCGCAGTCATTCCTTTTGAAGTGTCTGGAGCAG | |
| | GTGCGAAAGATTCAGGGCGATGGAGCCGCACTCCAAG | |
| | AGAAGCTCTGCGCGACATACAAACTTTGCCATCCCGA | |
| | GGAGCTCGTACTGCTCGGGCACAGCTTGGGGATTCCC | |
| | TGGGCTCCTCTCTCGTCCTGTCCGTCGCAGGCTTTGCA | |
| | GTTGGCAGGGTGCCTTTCCCAGCTCCACTCCGGTTTGT | |
| | TCTTGTATCAGGGACTGCTGCAAGCCCTTGAGGGAAT | |
| | CTCGCCAGAATTGGGCCCGACGCTGGACACGTTGCAG | |
| | CTCGACGTGGCGGATTTCGCAACAACCATCTGGCAGC | |
| | AGATGGAGGAACTGGGGATGGCACCCGCGCTGCAGCC | |
| | CACGCAGGGGGCAATGCCGGCCTTTGCGTCCGCGTTT | |
| | CAGCGCAGGGCGGGTGGAGTCCTCGTAGCGAGCCACC | |
| | TTCAATCATTTTTGGAAGTCTCGTACCGGGTGCTGAGA | |
| | CATCTTGCGCAGCCG | |
| | TGATAATAG | |
| | GATTCGTCAGTAGGGTTGTAAAGGTTTTTCTTTTCC | |
| | TGAGAAAACAACCTTTTGTTTTCTCAGGTTTTGCTT | |
| | TTTGGCCTTTCCCTAGCTTTAAAAAAAAAAAAGCAA | |
| | AAGTGGTCTTTGAATAAAGTCTGAGTGGGCGGCTCTA | |
| | GA | |
| | mRNA sequence (transcribed): | 5722 |
| | GGGAAAUAAGAGAGAAAAGAAGAGUAAGAAGAAAU | |
| | AUAAGAGCCACC | |
| | AUGGCCGGUCCCGCGACCCAAAGCCCCAUGAAACUU | |
| | AUGGCCCUGCAGUUGCUGCUUUGGCACUCGGCCCUC | |
| | UGGACAGUCCAAGAAGCGACUCCUCUCGGACCUGCC | |
| | UCAUCGUUGCCGCAGUCAUUCCUUUUGAAGUGUCUG | |
| | GAGCAGGUGCGAAAGAUUCAGGGCGAUGGAGCCGCA | |
| | CUCCAAGAGAAGCUCUGCGCGACAUACAAACUUUGC | |
| | CAUCCCGAGGAGCUCGUACUGCUCGGGCACAGCUUG | |
| | GGGAUUCCCUGGGCUCCUCUCUCGUCCUGUCCGUCG | |
| | CAGGCUUUGCAGUUGGCAGGGUGCCUUUCCCAGCUC | |
| | CACUCCGGUUUGUUCUUGUAUCAGGGACUGCUGCAA | |
| | GCCCUUGAGGGAAUCUCGCCAGAAUUGGGCCCGACG | |
| | CUGGACACGUUGCAGCUCGACGUGGCGGAUUUCGCA | |
| | ACAACCAUCUGGCAGCAGAUGGAGGAACUGGGGAUG | |
| | GCACCCGCGCUGCAGCCCACGCAGGGGGCAAUGCCG | |
| | GCCUUUGCGUCCGCGUUUCAGCGCAGGGCGGGUGGA | |
| | GUCCUCGUAGCGAGCCACCUUCAAUCAUUUUUGGAA | |
| | GUCUCGUACCGGGUGCUGAGACAUCUUGCGCAGCCG | |
| | UGAUAAUAG | |
| | GAUUCGUCAGUAGGGUUGUAAAGGUUUUUCUUUU | |
| | CCUGAGAAAACAACCUUUUGUUUUCUCAGGUUUUG | |
| | CUUUUUGGCCUUUCCCUAGCUUUAAAAAAAAAAAA | |
| | GCAAAAGUGGUCUUUGAAUAAAGUCUGAGUGGGCG | |
| | GC | |
| mCherry | Optimized mCherry cDNA sequence | 5723 |
| with | containing a T7 polymerase site, kozak | |
| Mouse | sequence, and a Mouse MALAT1 | |
| MALAT1 | sequence (bold): | |
| sequence | TAATACGACTCACTATA | |
| | GGGAAATAAGAGAGAAAAGAAGAGTAAGAAGAAATA | |
| | TAAGAGCCACC | |
| | ATGGTATCCAAGGGGGAGGAGGACAACATGGCGATC | |
| | ATCAAGGAGTTCATGCGATTCAAGGTGCACATGGAAG | |
| | GTTCGGTCAACGGACACGAATTTGAAATCGAAGGAGA | |
| | GGGTGAAGGAAGGCCCTATGAAGGGACACAGACCGC | |
| | GAAACTCAAGGTCACGAAAGGGGGACCACTTCCTTTC | |
| | GCCTGGGACATTCTTTCGCCCCAGTTTATGTACGGGTC | |
| | CAAAGCATATGTGAAGCATCCCGCCGATATTCCTGAC | |
| | TATCTGAAACTCAGCTTTCCCGAGGGATTCAAGTGGG | |
| | AGCGGGTCATGAACTTTGAGGACGGGGGTGTAGTCAC | |
| | CGTAACCCAAGACTCAAGCCTCCAAGACGGCGAGTTC | |
| | ATCTACAAGGTCAAACTGCGGGGGACTAACTTTCCGT | |
| | CGGATGGGCCGGTGATGCAGAAGAAAACGATGGGAT | |
| | GGGAAGCGTCATCGGAGAGGATGTACCCAGAAGATG | |
| | GTGCATTGAAGGGGGAGATCAAGCAGAGACTGAAGTT | |
| | GAAAGATGGGGGACATTATGATGCCGAGGTGAAAAC | |
| | GACATACAAAGCGAAAAAGCCGGTGCAGCTTCCCGGA | |
| | GCGTATAATGTGAATATCAAGTTGGATATTACTTCACA | |
| | CAATGAGGACTACACAATTGTCGAACAGTACGAACGC | |
| | GCTGAGGGTAGACACTCGACGGGAGGCATGGACGAG | |
| | TTGTACAAA | |
| | TGATAATAG | |
| | GATTCGTCAGTAGGGTTGTAAAGGTTTTTCTTTTCC | |
| | TGAGAAAACAACCTTTTGTTTTCTCAGGTTTTGCTT | |
| | TTTGGCCTTTCCCTAGCTTTAAAAAAAAAAAAGCAA | |
| | AAGTGGTCTTTGAATAAAGTCTGAGTGGGCGGCTCTA | |
| | GA | |
| | mRNA sequence (transcribed): | 5724 |
| | GGGAAAUAAGAGAGAAAAGAAGAGUAAGAAGAAAU | |
| | AUAAGAGCCACC | |
| | AUGGUAUCCAAGGGGGAGGAGGACAACAUGGCGAUC | |
| | AUCAAGGAGUUCAUGCGAUUCAAGGUGCACAUGGAA | |
| | GGUUCGGUCAACGGACACGAAUUUGAAAUCGAAGGA | |
| | GAGGGUGAAGGAAGGCCCUAUGAAGGGACACAGACC | |
| | GCGAAACUCAAGGUCACGAAAGGGGGACCACUUCCU | |
| | UUCGCCUGGGACAUUCUUUCGCCCCAGUUUAUGUAC | |
| | GGGUCCAAAGCAUAUGUGAAGCAUCCCGCCGAUAUU | |
| | CCUGACUAUCUGAAACUCAGCUUUCCCGAGGGAUUC | |
| | AAGUGGGAGCGGGUCAUGAACUUUGAGGACGGGGG | |
| | UGUAGUCACCGUAACCCAAGACUCAAGCCUCCAAGA | |
| | CGGCGAGUUCAUCUACAAGGUCAAACUGCGGGGGAC | |
| | UAACUUUCCGUCGGAUGGGCCGGUGAUGCAGAAGAA | |
| | AACGAUGGGAUGGGAAGCGUCAUCGGAGAGGAUGU | |
| | ACCCAGAAGAUGGUGCAUUGAAGGGGGAGAUCAAGC | |
| | AGAGACUGAAGUUGAAAGAUGGGGGACAUUAUGAU | |
| | GCCGAGGUGAAAACGACAUACAAAGCGAAAAAGCCG | |
| | GUGCAGCUUCCCGGAGCGUAUAAUGUGAAUAUCAAG | |
| | UUGGAUAUUACUUCACACAAUGAGGACUACACAAUU | |
| | GUCGAACAGUACGAACGCGCUGAGGGUAGACACUCG | |
| | ACGGGAGGCAUGGACGAGUUGUACAAA | |
| | UGAUAAUAG | |
| | GAUUCGUCAGUAGGGUUGUAAAGGUUUUUCUUUU | |
| | CCUGAGAAAACAACCUUUUGUUUUCUCAGGUUUUG | |
| | CUUUUUGGCCUUUCCCUAGCUUUAAAAAAAAAAAA | |
| | GCAAAAGUGGUCUUUGAAUAAAGUCUGAGUGGGCG | |
| | GC | |
| G-CSF | Optimized G-CSF cDNA sequence containing | 5725 |
| with | a T7 polymerase site, kozak sequence, | |
| Human | and a Human MALAT1 sequence (bold): | |
| MALAT1 | TAATACGACTCACTATA | |
| sequence | GGGAAATAAGAGAGAAAAGAAGAGTAAGAAGAAATA | |
| | TAAGAGCCACC | |
| | ATGGCCGGTCCCGCGACCCAAAGCCCCATGAAACTTA | |
| | TGGCCCTGCAGTTGCTGCTTTGGCACTCGGCCCTCTGG | |
| | ACAGTCCAAGAAGCGACTCCTCTCGGACCTGCCTCAT | |
| | CGTTGCCGCAGTCATTCCTTTTGAAGTGTCTGGAGCAG | |
| | GTGCGAAAGATTCAGGGCGATGGAGCCGCACTCCAAG | |
| | AGAAGCTCTGCGCGACATACAAACTTTGCCATCCCGA | |
| | GGAGCTCGTACTGCTCGGGCACAGCTTGGGGATTCCC | |
| | TGGGCTCCTCTCTCGTCCTGTCCGTCGCAGGCTTTGCA | |
| | GTTGGCAGGGTGCCTTTCCCAGCTCCACTCCGGTTTGT | |
| | TCTTGTATCAGGGACTGCTGCAAGCCCTTGAGGGAAT | |
| | CTCGCCAGAATTGGGCCCGACGCTGGACACGTTGCAG | |
| | CTCGACGTGGCGGATTTCGCAACAACCATCTGGCAGC | |
| | AGATGGAGGAACTGGGGATGGCACCCGCGCTGCAGCC | |
| | CACGCAGGGGGCAATGCCGGCCTTTGCGTCCGCGTTT | |
| | CAGCGCAGGGCGGGTGGAGTCCTCGTAGCGAGCCACC | |
| | TTCAATCATTTTTGGAAGTCTCGTACCGGGTGCTGAGA | |
| | CATCTTGCGCAGCCG | |
| | TGATAATAG | |
| | TGCTCTTCAGTAGGGTCATGAAGGTTTTTCTTTTCC | |
| | TGAGAAAACAACACGTATTGTTTTCTCAGGTTTTGC | |
| | TTTTTGGCCTTTTTCTAGCTTAAAAAAAAAAAAAGC | |
| | AAAAGTGGTCTTTGAATAAAGTCTGAGTGGGCGGCTC | |
| | TAGA | |
| | mRNA sequence (transcribed): | 5726 |
| | GGGAAAUAAGAGAGAAAAGAAGAGUAAGAAGAAAU | |
| | AUAAGAGCCACC | |
| | AUGGCCGGUCCCGCGACCCAAAGCCCCAUGAAACUU | |
| | AUGGCCCUGCAGUUGCUGCUUUGGCACUCGGCCCUC | |
| | UGGACAGUCCAAGAAGCGACUCCUCUCGGACCUGCC | |
| | UCAUCGUUGCCGCAGUCAUUCCUUUUGAAGUGUCUG | |
| | GAGCAGGUGCGAAAGAUUCAGGGCGAUGGAGCCGCA | |
| | CUCCAAGAGAAGCUCUGCGCGACAUACAAACUUUGC | |
| | CAUCCCGAGGAGCUCGUACUGCUCGGGCACAGCUUG | |
| | GGGAUUCCCUGGGCUCCUCUCUCGUCCUGUCCGUCG | |
| | CAGGCUUUGCAGUUGGCAGGGUGCCUUUCCCAGCUC | |
| | CACUCCGGUUUGUUCUUGUAUCAGGGACUGCUGCAA | |
| | GCCCUUGAGGGAAUCUCGCCAGAAUUGGGCCCGACG | |
| | CUGGACACGUUGCAGCUCGACGUGGCGGAUUUCGCA | |
| | ACAACCAUCUGGCAGCAGAUGGAGGAACUGGGGAUG | |
| | GCACCCGCGCUGCAGCCCACGCAGGGGGCAAUGCCG | |
| | GCCUUUGCGUCCGCGUUUCAGCGCAGGGCGGGUGGA | |
| | GUCCUCGUAGCGAGCCACCUUCAAUCAUUUUUGGAA | |
| | GUCUCGUACCGGGUGCUGAGACAUCUUGCGCAGCCG | |
| | UGAUAAUAG | |
| | UGCUCUUCAGUAGGGUCAUGAAGGUUUUUCUUUUC | |
| | CUGAGAAAACAACACGUAUUGUUUUCUCAGGUUUU | |
| | GCUUUUUGGCCUUUUUCUAGCUUAAAAAAAAAAAA | |
| | AGCAAAAGUGGUCUUUGAAUAAAGUCUGAGUGGGC | |
| | GGC | |
| mCherry | Optimized mCherry cDNA sequence | 5727 |
| with | containing a T7 polymerase site, kozak | |
| Human | sequence, and a Human MALAT1 | |
| MALAT1 | sequence (bold): | |
| sequence | TAATACGACTCACTATA | |
| | GGGAAATAAGAGAGAAAAGAAGAGTAAGAAGAAATA | |
| | TAAGAGCCACC | |
| | ATGGTATCCAAGGGGGAGGAGGACAACATGGCGATC | |
| | ATCAAGGAGTTCATGCGATTCAAGGTGCACATGGAAG | |
| | GTTCGGTCAACGGACACGAATTTGAAATCGAAGGAGA | |
| | GGGTGAAGGAAGGCCCTATGAAGGGACACAGACCGC | |
| | GAAACTCAAGGTCACGAAAGGGGGACCACTTCCTTTC | |
| | GCCTGGGACATTCTTTCGCCCCAGTTTATGTACGGGTC | |
| | CAAAGCATATGTGAAGCATCCCGCCGATATTCCTGAC | |
| | TATCTGAAACTCAGCTTTCCCGAGGGATTCAAGTGGG | |
| | AGCGGGTCATGAACTTTGAGGACGGGGGTGTAGTCAC | |
| | CGTAACCCAAGACTCAAGCCTCCAAGACGGCGAGTTC | |
| | ATCTACAAGGTCAAACTGCGGGGGACTAACTTTCCGT | |
| | CGGATGGGCCGGTGATGCAGAAGAAAACGATGGGAT | |
| | GGGAAGCGTCATCGGAGAGGATGTACCCAGAAGATG | |
| | GTGCATTGAAGGGGGAGATCAAGCAGAGACTGAAGTT | |
| | GAAAGATGGGGGACATTATGATGCCGAGGTGAAAAC | |
| | GACATACAAAGCGAAAAAGCCGGTGCAGCTTCCCGGA | |
| | GCGTATAATGTGAATATCAAGTTGGATATTACTTCACA | |
| | CAATGAGGACTACACAATTGTCGAACAGTACGAACGC | |
| | GCTGAGGGTAGACACTCGACGGGAGGCATGGACGAG | |
| | TTGTACAAA | |
| | TGATAATAG | |
| | TGCTCTTCAGTAGGGTCATGAAGGTTTTTCTTTTCC | |
| | TGAGAAAACAACACGTATTGTTTTCTCAGGTTTTGC | |
| | TTTTTGGCCTTTTTCTAGCTTAAAAAAAAAAAAAGC | |
| | AAAAGTGGTCTTTGAATAAAGTCTGAGTGGGCGGCTC | |
| | TAGA | |
| | mRNA sequence (transcribed): | 5728 |
| | GGGAAAUAAGAGAGAAAAGAAGAGUAAGAAGAAAU | |
| | AUAAGAGCCACC | |
| | AUGGUAUCCAAGGGGGAGGAGGACAACAUGGCGAUC | |
| | AUCAAGGAGUUCAUGCGAUUCAAGGUGCACAUGGAA | |
| | GGUUCGGUCAACGGACACGAAUUUGAAAUCGAAGGA | |
| | GAGGGUGAAGGAAGGCCCUAUGAAGGGACACAGACC | |
| | GCGAAACUCAAGGUCACGAAAGGGGGACCACUUCCU | |
| | UUCGCCUGGGACAUUCUUUCGCCCCAGUUUAUGUAC | |
| | GGGUCCAAAGCAUAUGUGAAGCAUCCCGCCGAUAUU | |
| | CCUGACUAUCUGAAACUCAGCUUUCCCGAGGGAUUC | |
| | AAGUGGGAGCGGGUCAUGAACUUUGAGGACGGGGG | |
| | UGUAGUCACCGUAACCCAAGACUCAAGCCUCCAAGA | |
| | CGGCGAGUUCAUCUACAAGGUCAAACUGCGGGGGAC | |
| | UAACUUUCCGUCGGAUGGGCCGGUGAUGCAGAAGAA | |
| | AACGAUGGGAUGGGAAGCGUCAUCGGAGAGGAUGU | |
| | ACCCAGAAGAUGGUGCAUUGAAGGGGGAGAUCAAGC | |
| | AGAGACUGAAGUUGAAAGAUGGGGGACAUUAUGAU | |
| | GCCGAGGUGAAAACGACAUACAAAGCGAAAAAGCCG | |
| | GUGCAGCUUCCCGGAGCGUAUAAUGUGAAUAUCAAG | |
| | UUGGAUAUUACUUCACACAAUGAGGACUACACAAUU | |
| | GUCGAACAGUACGAACGCGCUGAGGGUAGACACUCG | |
| | ACGGGAGGCAUGGACGAGUUGUACAAA | |
| | UGAUAAUAG | |
| | UGCUCUUCAGUAGGGUCAUGAAGGUUUUUCUUUUC | |
| | CUGAGAAAACAACACGUAUUGUUUUCUCAGGUUUU | |
| | GCUUUUUGGCCUUUUUCUAGCUUAAAAAAAAAAAA | |
| | AGCAAAAGUGGUCUUUGAAUAAAGUCUGAGUGGGC | |
| | GGC | |

[1042] These modified mRNA sequences can include at least one chemical modification described herein. The G-CSF or mCherry modified mRNA sequence can be formulated, using methods described herein and/or known in the art, prior to transfection and/or administration.

[1043] The modified mRNA sequence encoding G-CSF or mCherry can be transfected in vitro to various cell types such as HEK293, HeLa, PBMC and BJ fibroblast and those described in Table 25 using methods disclosed herein and/or are known in the art. The cells are then analyzed using methods disclosed herein and/or are known in the art to determine the concentration of G-CSF or mCherry and/or the cell viability.

### Example 39. Utilization of Heterologous 5′UTRs

[1044] A 5′ UTR may be provided as a flanking region to the nucleic acids, modified nucleic acids or mmRNA of the invention. 5′UTR may be homologous or heterologous to the coding region found in the nucleic acids, modified nucleic acids or mmRNA of the invention. Multiple 5′ UTRs may be included in the flanking region and may be the same or of different sequences. Any portion of the flanking regions, including none, may be codon optimized and any may independently contain one or more different structural or chemical modifications, before and/or after codon optimization.

[1045] Shown in Lengthy Table 21 in U.S. Provisional Application No. 61/775,509, filed Mar. 9, 2013, entitled Heterologous Untranslated Regions for mRNA and in Lengthy Table 21 in U.S. Provisional Application No. 61/829,372, filed May 31, 2013, entitled Heterologous Untranslated Regions for mRNA is a listing of the start and stop site of the polynucleotides, primary constructs or mmRNAs of the invention. Each 5′UTR (5′UTR-005 to 5′UTR 68511) is identified by its start and stop site relative to its native or wild type (homologous) transcript (ENST; the identifier used in the ENSEMBL database).

[1046] To alter one or more properties of the nucleic acids, modified nucleic acids or mmRNA of the invention, 5′UTRs which are heterologous to the coding region of the nucleic acids, modified nucleic acids or mmRNA of the invention are engineered into compounds of the invention. The nucleic acids, modified nucleic acids or mmRNA are then administered to cells, tissue or organisms and outcomes such as protein level, localization and/or half life are measured to evaluate the beneficial effects the heterologous 5′UTR may have on the nucleic acids, modified nucleic acids or mmRNA of the invention. Variants of the 5′ UTRs may be utilized wherein one or more nucleotides are added or removed to the termini, including A, T, C or G. 5′UTRs may also be codon-optimized or modified in any manner described herein.

### Example 40. Further Utilization of 5′ Untranslated Regions

[1047] A 5′ UTR may be provided as a flanking region to the nucleic acids, modified nucleic acids or mmRNA of the invention. 5′UTR may be homologous or heterologous to the coding region found in the nucleic acids, modified nucleic acids or mmRNA of the invention. Multiple 5′ UTRs may be included in the flanking region and may be the same or of different sequences. Any portion of the flanking regions, including none, may be codon optimized and any may independently contain one or more different structural or chemical modifications, before and/or after codon optimization.

[1048] Shown in Table 38 is a listing of 5′-untranslated regions which may be used with the nucleic acids, modified nucleic acids or mmRNA of the present invention.

[1049] To alter one or more properties of the nucleic acids, modified nucleic acids or mmRNA of the invention, 5′UTRs which are heterologous to the coding region of the nucleic acids, modified nucleic acids or mmRNA of the invention are engineered into compounds of the invention. The nucleic acids, modified nucleic acids or mmRNA are then administered to cells, tissue or organisms and outcomes such as protein level, localization and/or half life are measured to evaluate the beneficial effects the heterologous 5′UTR may have on the nucleic acids, modified nucleic acids or mmRNA of the invention. Variants of the 5′ UTRs may be utilized wherein one or more nucleotides are added or removed to the termini, including A, T, C or G. 5′UTRs may also be codon-optimized or modified in any manner described herein.

TABLE 38
5′-Untranslated Regions

| 5′ UTR | Name/ | | SEQ |
|---|---|---|---|
| Identi- | Descrip- | | ID |
| fier | tion | Sequence | NO. |
| 5UTR- | Upstream | GGGAGATCAGAGAGAAAAGA | 5729 |
| 68512 | UTR | AGAGTAAGAAGAAATATAAG | |
| | | AGCCACC | |
| 5UTR- | Upstream | GGAATAAAAGTCTCAACACA | 5730 |
| 68513 | UTR | ACATATACAAAACAAACGAA | |
| | | TCTCAAGCAATCAAGCATTC | |
| | | TACTTCTATTGCAGCAATTT | |
| | | AAATCATTTCTTTTAAAGCA | |
| | | AAAGCAATTTTCTGAAAATT | |
| | | TTCACCATTTACGAACGATA | |
| | | GCAAC | |
| 5UTR- | Upstream | GGGAGACAAGCUUGGCAUUC | 5731 |
| 68514 | UTR | CGGUACUGUUGGUAAAGCCA | |
| | | CC | |
| 5UTR- | Upstream | GGGAATTAACAGAGAAAAGA | 5732 |
| 68515 | UTR | AGAGTAAGAAGAAATATAAG | |
| | | AGCCACC | |
| 5UTR- | Upstream | GGGAAATTAGACAGAAAAGA | 5733 |
| 68516 | UTR | AGAGTAAGAAGAAATATAAG | |
| | | AGCCACC | |
| 5UTR- | Upstream | GGGAAATAAGAGAGTAAAGA | 5734 |
| 68517 | UTR | ACAGTAAGAAGAAATATAAG | |
| | | AGCCACC | |
| 5UTR- | Upstream | GGGAAAAAAGAGAGAAAAGA | 5735 |
| 68518 | UTR | AGACTAAGAAGAAATATAAG | |
| | | AGCCACC | |
| 5UTR- | Upstream | GGGAAATAAGAGAGAAAAGA | 5736 |
| 68519 | UTR | AGAGTAAGAAGATATATAAG | |
| | | AGCCACC | |
| 5UTR- | Upstream | GGGAAATAAGAGACAAAACA | 5737 |
| 68520 | UTR | AGAGTAAGAAGAAATATAAG | |
| | | AGCCACC | |
| 5UTR- | Upstream | GGGAAATTAGAGAGTAAAGA | 5738 |
| 68521 | UTR | ACAGTAAGTAGAATTAAAAG | |
| | | AGCCACC | |
| 5UTR- | Upstream | GGGAAATAAGAGAGAATAGA | 5739 |
| 68522 | UTR | AGAGTAAGAAGAAATATAAG | |
| | | AGCCACC | |
| 5UTR- | Upstream | GGGAAATAAGAGAGAAAAGA | 5740 |
| 68523 | UTR | AGAGTAAGAAGAAAATTAAG | |
| | | AGCCACC | |
| 5UTR- | Upstream | GGGAAATAAGAGAGAAAAGA | 5741 |
| 68524 | UTR | AGAGTAAGAAGAAATTTAAG | |
| | | AGCCACC | |

### Example 41. Protein Production Using Heterologous 5′UTRs

[1050] The day before transfection, 20,000 HeLa cells (ATCC no. CCL-2; Manassas, VA) were harvested by treatment with Trypsin-EDTA solution (LifeTechnologies, Grand Island, NY) and seeded in a total volume of 100 μl EMEM medium (supplemented with 10% FCS and 1× Glutamax) per well in a 96-well cell culture plate (Corning, Manassas, VA). The cells were grown at 37° C. in 5% C02 atmosphere overnight. The next day, 37.5 ng, 75 ng or 150 of G-CSF modified RNA comprising a nucleic acid sequence for 5UTR-001 (mRNA sequence shown in SEQ ID NO: 5; polyA tail of approximately 140 nucleotides not shown in sequence; 5′cap, Cap1I; fully modified with 5-methylcytidine and 1-methylpseudouridine), G-CSF modified RNA comprising a nucleic acid sequence for 5UTR-68515 (mRNA sequence shown in SEQ ID NO: 5732; polyA tail of approximately 140 nucleotides not shown in sequence; 5′cap, Cap1; fully modified with 5-methylcytidine and 1-methylpseudouridine), G-CSF modified RNA comprising a nucleic acid sequence for 5UTR-68516 (mRNA sequence shown in SEQ ID NO: 5733; polyA tail of approximately 140 nucleotides not shown in sequence; 5′cap, Cap1; fully modified with 5-methylcytidine and 1-methylpseudouridine), G-CSF modified RNA comprising a nucleic acid sequence for 5UTR-68521 (mRNA sequence shown in SEQ ID NO: 5738; polyA tail of approximately 140 nucleotides not shown in sequence; 5′cap, Cap1; fully modified with 5-methylcytidine and 1-methylpseudouridine) or G-CSF modified RNA comprising a nucleic acid sequence for 5UTR-68522 (mRNA sequence shown in SEQ ID NO: 5739; polyA tail of approximately 140 nucleotides not shown in sequence; 5′cap, Cap1; fully modified with 5-methylcytidine and 1-methylpseudouridine) were diluted in 10 μl final volume of OPTI-MEM (LifeTechnologies, Grand Island, NY). Lipofectamine 2000 (LifeTechnologies, Grand Island, NY) was used as transfection reagent and 0.2 μl were diluted in 10 μl final volume of OPTI-MEM. After 5 minutes of incubation at room temperature, both solutions were combined and incubated an additional 15 minute at room temperature. Then the 20 μl combined solution was added to the 100 μl cell culture medium containing the HeLa cells and incubated at room temperature.

[1051] After an incubation of 24 hours cells expressing G-CSF were lysed with 100 μl of Passive Lysis Buffer (Promega, Madison, WI) according to manufacturer instructions. G-CSF protein production was determined by ELISA.

[1052] These results, shown in Table 39, demonstrate that G-CSF mRNA comprising the 5UTR-68515 or 5UTR-68521 produced the most protein whereas G-CSF mRNA comprising 5UTR-68522 produced the least amount of protein.

TABLE 39
G-CSF Protein Production from Heterologous 5′UTRs

| | G-CSF Protein (ng/ml) | | |
|---|---|---|---|
| 5′UTR | 37.5 ng | 75 ng | 150 ng |
| 5UTR-001 | 131.3 | 191.1 | 696.1 |
| 5UTR-68515 | 245.6 | 394.3 | 850.3 |
| 5UTR-68516 | 188.6 | 397.4 | 719.6 |
| 5UTR-68521 | 191.4 | 449.1 | 892.1 |
| 5UTR-68522 | 135.9 | 331.3 | 595.6 |

### Example 42. Effect of the Kozak Sequence in Modified Nucleic Acids

[1053] HeLa cells were seeded at a density of 15,000 per well in 100 μl cell culture medium DMEM+FBS 10%. G-CSF mRNA having a Kozak sequence (G-CSF Kozak; mRNA sequence shown in SEQ ID NO: 5004; polyA tail of approximately 140 nucleotides not shown in sequence; 5′cap, Cap1; fully modified with 5-methylcytidine and 1-methylpseudouridine) or G-CSF mRNA not having a Kozak sequence (G-CSF no Kozak; mRNA sequence shown in SEQ ID NO: 5008; polyA tail of approximately 140 nucleotides not shown in sequence; 5′cap, Cap1; fully modified with 5-methylcytidine and 1-methylpseudouridine) and transfected in triplicate at a concentration of 75 ng per well in 96 well plates. 24 hours, 48 hours and 72 hours after transfection, the supernatant was collected and expression of G-CSF was measured by ELISA, and the results are shown in Table 40.

TABLE 40
G-CSF Expression

| | G-CSF Kozak | G-CSF No Kozak |
|---|---|---|
| Time point | Protein Expression (ng/ml) | Protein Expression (ng/ml) |
| 24 hours | 223.93 | 408.23 |
| 48 hours | 604.76 | 1217.29 |
| 72 hours | 365.48 | 703.93 |

### Example 43. Effect of the Altering the 5′UTR in Modified Nucleic Acids

[1054] mRNA encoding a polypeptide of interest and having a polyA sequence and a cap, is fully modified with at least one chemistry described herein and/or in co-pending International Publication No WO2013052523, the contents of which are herein incorporated by reference in its entirety and the mRNA comprises a 5′UTR from Table 41. HeLa cells are seeded in cell culture medium and are transfected with the mRNA at a pre-determined concentration (ng per well) in well plates. At pre-determined intervals (e.g., 2 hours, 4 hours, 6 hours, 8 hours, 10 hours, 12 hours, 14 hours, 16 hours, 18 hours, 20 hours, 22 hours, 24 hours, 36 hours, 48 hours, 60 hours and/or 72 hours) after transfection, the supernatant is collected and expression of protein is measured by ELISA.

TABLE 41
5′ UTR

| 5′ UTR | Name/ | | SEQ |
|---|---|---|---|
| Identi- | Descrip- | | ID |
| fier | tion | Sequence | NO. |
| 5UTR- | Synthetic | GGGAAATAAGAGAGAAAAGAAGAG | 5 |
| 001 | UTR | TAAGAAGAAATATAAGAGCCACC | |
| 5UTR- | Synthetic | GGGAAATAAGAGAGAAAAGAAGAG | 5742 |
| 68525 | UTR | TAAGAAGAAATATAAGAGCCTCC | |
| 5UTR- | Synthetic | GGGAAATAAGAGAGAAAAGAAGAG | 5743 |
| 68526 | UTR | TAAGAAGAAATATATGA | |
| 5UTR- | Synthetic | GGGAAATAAGAGAGAAAAGAAGAG | 5744 |
| 68527 | UTR | TAAGAAGAAATATA | |

### Example 44. Effect of the PolyA Tail Length in Modified Nucleic Acids

### A. Bioanalyzer

[1055] Modified G-CSF mRNA (mRNA sequence shown in SEQ ID NO: 5745; 5′cap, Cap 1 fully modified with 5-methylcytidine and 1-methylpseudouridine (5 mc/1 mpU) or fully modified with 1-methylpseudouridine (1 mpU)), modified Factor IX (FIX) mRNA (mRNA sequence shown in SEQ ID NO: 5746; 5′cap, Cap 1 fully modified with 5-methylcytidine and 1-methylpseudouridine (5 mc/1 mpU) or fully modified with 1-methylpseudouridine (1 mpU)), modified erythropoietin (EPO) mRNA (mRNA sequence shown in SEQ ID NO: 5747; 5′cap, Cap 1 fully modified with 5-methylcytidine and 1-methylpseudouridine (5 mc/1 mpU) or fully modified with 1-methylpseudouridine (1 mpU)) or modified mCherry mRNA (mRNA sequence shown in SEQ ID NO: 5748; 5′cap, Cap 1 fully modified with 5-methylcytidine and 1-methylpseudouridine (5 mc/1 mpU) or fully modified with 1-methylpseudouridine (1 mpU)) having a polyA tail of 20, 40, 80, 100, 120, 140 or 160 nucleotides in length or no polyA tail were analyzed by bioanalyzer (Agilent 2100 bioanalyzer). All samples, maintained integrity of the mRNA as determined by bioanalyzer.

### B. BJ Fibroblasts

[1056] Human primary foreskin fibroblasts (BJ fibroblasts) are obtained from American Type Culture Collection (ATCC) (catalog #CRL-2522) and grown in Eagle's Minimum Essential Medium (ATCC, cat #11095-114) supplemented with 10% fetal bovine serum at 37° C., under 5% CO2. BJ fibroblasts are seeded on a 24-well plate at a density of 100,000 cells per well in 0.5 ml of culture medium. 250 ng of modified G-CSF mRNA (mRNA sequence shown in SEQ ID NO: 5745; 5′cap, Cap 1 fully modified with 5-methylcytidine and 1-methylpseudouridine (5 mc/1 mpU) or fully modified with 1-methylpseudouridine (1 mpU)), modified Factor IX (FIX) mRNA (mRNA sequence shown in SEQ ID NO: 5746; 5′cap, Cap 1 fully modified with 5-methylcytidine and 1-methylpseudouridine (5 mc/1 mpU) or fully modified with 1-methylpseudouridine (1 mpU)), modified erythropoietin (EPO) mRNA (mRNA sequence shown in SEQ ID NO: 5747; 5′cap, Cap 1 fully modified with 5-methylcytidine and 1-methylpseudouridine (5 mc/1 mpU) or fully modified with 1-methylpseudouridine (1 mpU)) or modified mCherry mRNA (mRNA sequence shown in SEQ ID NO: 5748; 5′cap, Cap 1 fully modified with 5-methylcytidine and 1-methylpseudouridine (5 mc/1 mpU) or fully modified with 1-methylpseudouridine (1 mpU)) having a polyA tail of 20, 40, 80, 100, 120, 140 or 160 nucleotides in length or no polyA tail were transfected using Lipofectamine 2000, following manufacturer's protocol. FIX, G-CSF and EPO were transfected in triplicate.

[1057] The supernatant was collected at 24 hours, 48 hours and 72 hours for FIX, G-CSF and EPO and at 24 hours for mCherry. The protein expression was analyzed by ELISA for FIX, G-CSF and EPO and fluorescence-activated cell sorting (FACS) for mCherry. The results for G-CSF are shown in Table 42, the results for EPO are shown in Table 43, the results for FIX are shown in Table 44 and the results for mCherry are shown in Table 45.

TABLE 42
G-CSF Protein Expression

| Description | PolyA Tail Length | Time Point | Protein (ng/ml) |
|---|---|---|---|
| G-CSF 5mC/1mpU | 0 | 24 | 1.13 |
| | | 48 | 0.39 |
| | | 72 | 0.2 |
| G-CSF 1mpU | 0 | 24 | 2 |
| | | 48 | 0.3 |
| | | 72 | 0.16 |
| G-CSF 5mC/1mpU | 20 | 24 | 41.85 |
| | | 48 | 32.75 |
| | | 72 | 13.38 |
| G-CSF 1mpU | 20 | 24 | 204.43 |
| | | 48 | 138.71 |
| | | 72 | 96.36 |
| G-CSF 5mC/1mpU | 40 | 24 | 102.75 |
| | | 48 | 101.96 |
| | | 72 | 48.97 |
| G-CSF 1mpU | 40 | 24 | 451.71 |
| | | 48 | 373.75 |
| | | 72 | 217.62 |
| G-CSF 5mC/1mpU | 80 | 24 | 135.85 |
| | | 48 | 167.21 |
| | | 72 | 96.66 |
| G-CSF 1mpU | 80 | 24 | 534.89 |
| | | 48 | 352.39 |
| | | 72 | 203.89 |
| G-CSF 5mC/1mpU | 100 | 24 | 168.31 |
| | | 48 | 195.16 |
| | | 72 | 127.8 |
| G-CSF 1mpU | 100 | 24 | 561 |
| | | 48 | 406.8 |
| | | 72 | 265.64 |
| G-CSF 5mC/1mpU | 120 | 24 | 152.54 |
| | | 48 | 187.06 |
| | | 72 | 100.41 |
| G-CSF 1mpU | 120 | 24 | 656.23 |
| | | 48 | 511.01 |
| | | 72 | 239.95 |
| G-CSF 5mC/1mpU | 140 | 24 | 146.24 |
| | | 48 | 202.05 |
| | | 72 | 121.89 |
| G-CSF 1mpU | 140 | 24 | 724.58 |
| | | 48 | 627.6 |
| | | 72 | 341.61 |
| G-CSF 5mC/1mpU | 160 | 24 | 59.83 |
| | | 48 | 101.30 |
| | | 72 | 64.69 |
| G-CSF 1mpU | 160 | 24 | 814.54 |
| | | 48 | 579.65 |
| | | 72 | 274.7 |

TABLE 43
EPO Protein Expression

| Description | PolyA Tail Length | Time Point | Protein (ng/ml) |
|---|---|---|---|
| EPO 5mC/1mpU | 0 | 24 | 3.12 |
| | | 48 | 0.13 |
| | | 72 | 0 |
| EPO 1mpU | 0 | 24 | 0.77 |
| | | 48 | 0.07 |
| | | 72 | 0.007 |
| EPO 5mC/1mpU | 20 | 24 | 48.93 |
| | | 48 | 21.72 |
| | | 72 | 5.88 |
| EPO 1mpU | 20 | 24 | 199.24 |
| | | 48 | 42.9 |
| | | 72 | 20.29 |
| EPO 5mC/1mpU | 40 | 24 | 400.66 |
| | | 48 | 165.38 |
| | | 72 | 63.36 |
| EPO 1mpU | 40 | 24 | 210 |
| | | 48 | 182.56 |
| | | 72 | 54.31 |
| EPO 5mC/1mpU | 80 | 24 | 368.09 |
| | | 48 | 303.05 |
| | | 72 | 117.98 |
| EPO 1mpU | 80 | 24 | 422.95 |
| | | 48 | 229.53 |
| | | 72 | 131.05 |
| EPO 5mC/1mpU | 100 | 24 | 619.59 |
| | | 48 | 366.19 |
| | | 72 | 199.63 |
| EPO 1mpU | 100 | 24 | 374.88 |
| | | 48 | 240.21 |
| | | 72 | 128.08 |
| EPO 5mC/1mpU | 120 | 24 | 430.64 |
| | | 48 | 354.6 |
| | | 72 | 165.72 |
| EPO 1mpU | 120 | 24 | 358.02 |
| | | 48 | 193.77 |
| | | 72 | 104.89 |
| EPO 5mC/1mpU | 140 | 24 | 531 |
| | | 48 | 426.96 |
| | | 72 | 164.3 |
| EPO 1mpU | 140 | 24 | 355.96 |
| | | 48 | 202.27 |
| | | 72 | 99.88 |
| EPO 5mC/1mpU | 160 | 24 | 608.66 |
| | | 48 | 324.31 |
| | | 72 | 181.94 |
| EPO 1mpU | 160 | 24 | 351.01 |
| | | 48 | 197.76 |
| | | 72 | 109.64 |

TABLE 44
FIX Protein Expression

| Description | PolyA Tail Length | Time Point | Protein (ng/ml) |
|---|---|---|---|
| FIX 5mC/1mpU | 0 | 24 | 0.51 |
| | | 48 | 1.14 |
| | | 72 | 0.47 |
| FIX 1mpU | 0 | 24 | 0.61 |
| | | 48 | 0.39 |
| | | 72 | 0.36 |
| FIX 5mC/1mpU | 20 | 24 | 0.92 |
| | | 48 | 0.46 |
| | | 72 | 0.49 |
| FIX 1mpU | 20 | 24 | 5.97 |
| | | 48 | 14.99 |
| | | 72 | 7.47 |
| FIX 5mC/1mpU | 40 | 24 | 2.27 |
| | | 48 | 1.62 |
| | | 72 | 0.5 |
| FIX 1mpU | 40 | 24 | 15.32 |
| | | 48 | 41.92 |
| | | 72 | 21.05 |
| FIX 5mC/1mpU | 80 | 24 | 7.12 |
| | | 48 | 10.14 |
| | | 72 | 3.66 |
| FIX 1mpU | 80 | 24 | 35.32 |
| | | 48 | 74.18 |
| | | 72 | 38.47 |
| FIX 5mC/1mpU | 100 | 24 | 8.47 |
| | | 48 | 13.33 |
| | | 72 | 6.73 |
| FIX 1mpU | 100 | 24 | 40.5 |
| | | 48 | 90.56 |
| | | 72 | 54.85 |
| FIX 5mC/1mpU | 120 | 24 | 10.06 |
| | | 48 | 15.89 |
| | | 72 | 6.2 |
| FIX 1mpU | 120 | 24 | 47.5 |
| | | 48 | 106.55 |
| | | 72 | 59.35 |
| FIX 5mC/1mpU | 140 | 24 | 11.16 |
| | | 48 | 20.13 |
| | | 72 | 8.85 |
| FIX 1mpU | 140 | 24 | 46.44 |
| | | 48 | 109.03 |
| | | 72 | 60.17 |
| FIX 5mC/1mpU | 160 | 24 | 13.06 |
| | | 48 | 22.31 |
| | | 72 | 10.19 |
| FIX 1mpU | 160 | 24 | 45.35 |
| | | 48 | 99.47 |
| | | 72 | 60.48 |

TABLE 45
mCherry Expression

| | PolyA Tail | Time | Expression |
|---|---|---|---|
| Description | Length | Point | index |
| mCherry 5mC/1mpU | 0 | 24 | 445946.66 |
| mCherry 1mpU | 0 | 24 | 509423.33 |
| mCherry 5mC/1mpU | 20 | 24 | 510846.66 |
| mCherry 1mpU | 20 | 24 | 1688910 |
| mCherry 5mC/1mpU | 40 | 24 | 1443583.33 |
| mCherry 1mpU | 40 | 24 | 3398540 |
| mCherry 5mC/1mpU | 80 | 24 | 1949826.66 |
| mCherry 1mpU | 80 | 24 | 5783383.33 |
| mCherry 5mC/1mpU | 100 | 24 | 4963426.66 |
| mCherry 1mpU | 100 | 24 | 4639580 |
| mCherry 5mC/1mpU | 120 | 24 | 5372706.66 |
| mCherry 1mpU | 120 | 24 | 9184466.66 |
| mCherry 5mC/1mpU | 140 | 24 | 5127563.33 |
| mCherry 1mpU | 140 | 24 | 5273213.33 |
| mCherry 5mC/1mpU | 160 | 24 | 5627163.33 |
| mCherry 1mpU | 160 | 24 | 4876160 |

### Example 45. Modified Nucleic Acids with a Mir-122 Sequence

### A. HeLa Cells

[1058] HeLa cells were seeded at a density of 15,000 per well in 100 μl cell culture medium (DMEM+10% FBS). G-CSF mRNA having a miR-122 sequence in the 3′UTR (G-CSF miR122; mRNA sequence shown in SEQ ID NO: 5024; polyA tail of approximately 140 nucleotides not shown in sequence; 5′cap,Cap 1; fully modified with 5-methylcytidine and 1-methylpseudouridine) or G-CSF mRNA having a miR-122 sequence without the seed sequence in the 3′UTR (G-CSF seedless; mRNA sequence shown in SEQ ID NO: 5028; polyA tail of approximately 140 nucleotides not shown in sequence; 5′cap, Cap1; fully modified with 5-methylcytidine and 1-methylpseudouridine) were transfected with 0.3 μl per well of Lipofectamine 2000 at a concentration of 75 ng of mRNA per well in 96 well plates. The supernatant was collected between 16-18 hours after transfection and expression of G-CSF was measured by ELISA, and the results are shown in Table 46.

TABLE 46
G-CSF Expression in HeLa

| | Protein Expression |
|---|---|
| Description | (ng/ml) |
| G-CSF | 292.1 |
| miR122 | |
| G-CSF | 335.7 |
| seedless | |

### B. Primary Human and Rat Hepatocytes

[1059] Primary human or rat hepatocytes cells were seeded at a density of 350,000 cells per well in 500 μl cell culture medium (InvitroGRO CP and InVitroGRO HI Medium+2.2% Torpedo Antibiotic Mix). G-CSF mRNA having a miR-122 sequence in the 3′UTR (G-CSF miR122; mRNA sequence shown in SEQ ID NO: 5024; polyA tail of approximately 140 nucleotides not shown in sequence; 5′cap, Cap1; fully modified with 5-methylcytidine and 1-methylpseudouridine) or G-CSF mRNA having a miR-122 sequence without the seed sequence in the 3′UTR (G-CSF seedless; mRNA sequence shown in SEQ ID NO: 5028; polyA tail of approximately 140 nucleotides not shown in sequence; 5′cap, Cap1; fully modified with 5-methylcytidine and 1-methylpseudouridine) were transfected with 1 ul per well of Lipofectamine 2000 at a concentration of 500 ng of mRNA per well in 24 well plates for the primary human hepatocytes and the primary rat hepatocytes. The supernatant was collected between 16-18 hours after transfection and expression of G-CSF was measured by ELISA, and the results are shown in Table 47. The mir-122 binding site sequence in the mRNA dampened the G-CSF protein expression in the primary hepatocytes.

TABLE 47
G-CSF Expression in Hepatocytes

| | Primary Human Hepatocytes | Primary Rat Hepatocytes |
|---|---|---|
| Description | Protein Expression (ng/ml) | Protein Expression (ng/ml) |
| G-CSF | 116 | 26 |
| miR122 | | |
| G-CSF | 463 | 85 |
| seedless | | |

### Example 46. Time Course of Modified Nucleic Acids with a Mir-122 Sequence

### A. HeLa Cells

[1060] HeLa cells were seeded at a density of 17,000 per well in 100 ul cell culture medium (DMEM+10% FBS). G-CSF mRNA without a miR-122 sequence in the 3′UTR (G-CSF; mouse 3′ UTR mRNA sequence shown in SEQ ID NO: 5717; polyA tail of approximately 140 nucleotides not shown in sequence; 5′cap, Cap1; fully modified with 5-methylcytidine and 1-methylpseudouridine; human 3′UTR mRNA sequence shown in SEQ ID NO: 5716; polyA tail of approximately 140 nucleotides not shown in sequence; 5′cap, Cap1; fully modified with 5-methylcytidine and 1-methylpseudouridine), G-CSF mRNA having a miR-122 sequence in the 3′UTR (G-CSF miR122; mouse 3′ UTR mRNA sequence shown in SEQ ID NO: 5024; polyA tail of approximately 140 nucleotides not shown in sequence; 5′cap, Cap1; fully modified with 5-methylcytidine and 1-methylpseudouridine; human 3′UTR mRNA sequence shown in SEQ ID NO: 5018; polyA tail of approximately 140 nucleotides not shown in sequence; 5′cap, Cap1; fully modified with 5-methylcytidine and 1-methylpseudouridine), G-CSF mRNA having a miR-122 seed sequence in the 3′UTR (G-CSF seed; mouse 3′ UTR mRNA sequence shown in SEQ ID NO: 5026; polyA tail of approximately 140 nucleotides not shown in sequence; 5′cap, Cap1; fully modified with 5-methylcytidine and 1-methylpseudouridine; human 3′UTR mRNA sequence shown in SEQ ID NO: 5020; polyA tail of approximately 140 nucleotides not shown in sequence; 5′cap, Cap1; fully modified with 5-methylcytidine and 1-methylpseudouridine), G-CSF mRNA having a miR-122 sequence without the seed sequence in the 3′UTR (G-CSF seedless; mouse 3′ UTR mRNA sequence shown in SEQ ID NO: 5028; polyA tail of approximately 140 nucleotides not shown in sequence; 5′cap, Cap1; fully modified with 5-methylcytidine and 1-methylpseudouridine; human 3′UTR mRNA sequence shown in SEQ ID NO: 5022; polyA tail of approximately 140 nucleotides not shown in sequence; 5′cap, Cap1; fully modified with 5-methylcytidine and 1-methylpseudouridine), Factor IX mRNA without a miR-122 sequence in the 3′UTR (FIX; mouse 3′ UTR mRNA sequence shown in SEQ ID NO: 5719; polyA tail of approximately 140 nucleotides not shown in sequence; 5′cap, Cap1; fully modified with 5-methylcytidine and 1-methylpseudouridine; human 3′UTR mRNA sequence shown in SEQ ID NO: 5718; polyA tail of approximately 140 nucleotides not shown in sequence; 5′cap, Cap1; fully modified with 5-methylcytidine and 1-methylpseudouridine), Factor IX mRNA having a miR-122 sequence in the 3′UTR (FIX miR122; mouse 3′ UTR mRNA sequence shown in SEQ ID NO: 5036; polyA tail of approximately 140 nucleotides not shown in sequence; 5′cap, Cap1; fully modified with 5-methylcytidine and 1-methylpseudouridine; human 3′UTR mRNA sequence shown in SEQ ID NO: 5030; polyA tail of approximately 140 nucleotides not shown in sequence; 5′cap, Cap1; fully modified with 5-methylcytidine and 1-methylpseudouridine), Factor IX mRNA having a miR-122 seed sequence in the 3′UTR (FIX seed; mouse 3′ UTR mRNA sequence shown in SEQ ID NO: 5038; polyA tail of approximately 140 nucleotides not shown in sequence; 5′cap, Cap1; fully modified with 5-methylcytidine and 1-methylpseudouridine; human 3′UTR mRNA sequence shown in SEQ ID NO: 5032; polyA tail of approximately 140 nucleotides not shown in sequence; 5′cap, Cap1; fully modified with 5-methylcytidine and 1-methylpseudouridine) or Factor IX mRNA having a miR-122 sequence without the seed sequence in the 3′UTR (FIX seedless; mouse 3′ UTR mRNA sequence shown in SEQ ID NO: 5040; polyA tail of approximately 140 nucleotides not shown in sequence; 5′cap, Cap1; fully modified with 5-methylcytidine and 1-methylpseudouridine; human 3′UTR mRNA sequence shown in SEQ ID NO: 5034; polyA tail of approximately 140 nucleotides not shown in sequence; 5′cap, Cap1; fully modified with 5-methylcytidine and 1-methylpseudouridine) were transfected with 0.3 μl per well of Lipofectamine 2000 at a concentration of 75 ng of mRNA per well in 96 well plates. The supernatant was collected between 16-18 hours after transfection, expression of G-CSF or Factor IX was measured by ELISA, and the results are shown in Table 48.

TABLE 48
Expression in HeLa

| | Protein Expression Mm | Protein Expression |
|---|---|---|
| | 3′UTR | Hs 3′UTR |
| Description | (ng/ml) | (ng/ml) |
| G-CSF | 271.72 | 69.4 |
| G-CSF | 305.36 | 68.8 |
| miR122 | | |
| G-CSF seed | 209.5 | 98.0 |
| G-CSF seedless | 243.2 | 80.9 |
| FIX | 249.8 | 131.6 |
| FIX mir122 | 204.6 | 55.4 |
| FIX seed | 290.05 | 127.6 |
| FIX seedless | 180.9 | 31.6 |

### B. Primary Human and Rat Hepatocytes

[1061] Primary human or rat hepatocytes cells were seeded at a density of 350,000 cells per well in 500 μl cell culture medium (InvitroGRO CP and InVitroGRO HI Medium+2.2% Torpedo Antibiotic). G-CSF mRNA without a miR-122 sequence in the 3′UTR (G-CSF; mouse 3′ UTR mRNA sequence shown in SEQ ID NO: 5717; polyA tail of approximately 140 nucleotides not shown in sequence; 5′cap, Cap1; fully modified with 5-methylcytidine and 1-methylpseudouridine; human 3′UTR mRNA sequence shown in SEQ ID NO: 5716; polyA tail of approximately 140 nucleotides not shown in sequence; 5′cap, Cap1; fully modified with 5-methylcytidine and 1-methylpseudouridine), G-CSF mRNA having a miR-122 sequence in the 3′UTR (G-CSF miR122; mouse 3′ UTR mRNA sequence shown in SEQ ID NO: 5024; polyA tail of approximately 140 nucleotides not shown in sequence; 5′cap, Cap1; fully modified with 5-methylcytidine and 1-methylpseudouridine; human 3′UTR mRNA sequence shown in SEQ ID NO: 5018; polyA tail of approximately 140 nucleotides not shown in sequence; 5′cap, Cap1; fully modified with 5-methylcytidine and 1-methylpseudouridine), G-CSF mRNA having a miR-122 seed sequence in the 3′UTR (G-CSF seed; mouse 3′ UTR mRNA sequence shown in SEQ ID NO: 5026; polyA tail of approximately 140 nucleotides not shown in sequence; 5′cap, Cap1; fully modified with 5-methylcytidine and 1-methylpseudouridine; human 3′UTR mRNA sequence shown in SEQ ID NO: 5020; polyA tail of approximately 140 nucleotides not shown in sequence; 5′cap, Cap1; fully modified with 5-methylcytidine and 1-methylpseudouridine), G-CSF mRNA having a miR-122 sequence without the seed sequence in the 3′UTR (G-CSF seedless; mouse 3′ UTR mRNA sequence shown in SEQ ID NO: 5028; polyA tail of approximately 140 nucleotides not shown in sequence; 5′cap, Cap1; fully modified with 5-methylcytidine and 1-methylpseudouridine; human 3′UTR mRNA sequence shown in SEQ ID NO: 5022; polyA tail of approximately 140 nucleotides not shown in sequence; 5′cap, Cap1; fully modified with 5-methylcytidine and 1-methylpseudouridine), Factor IX mRNA without a miR-122 sequence in the 3′UTR (FIX; mouse 3′ UTR mRNA sequence shown in SEQ ID NO: 5719; polyA tail of approximately 140 nucleotides not shown in sequence; 5′cap, Cap1; fully modified with 5-methylcytidine and 1-methylpseudouridine; human 3′UTR mRNA sequence shown in SEQ ID NO: 5718; polyA tail of approximately 140 nucleotides not shown in sequence; 5′cap, Cap1; fully modified with 5-methylcytidine and 1-methylpseudouridine), Factor IX mRNA having a miR-122 sequence in the 3′UTR (FIX miR122; mouse 3′ UTR mRNA sequence shown in SEQ ID NO: 5036; polyA tail of approximately 140 nucleotides not shown in sequence; 5′cap, Cap1; fully modified with 5-methylcytidine and 1-methylpseudouridine; human 3′UTR mRNA sequence shown in SEQ ID NO: 5030; polyA tail of approximately 140 nucleotides not shown in sequence; 5′cap, Cap1; fully modified with 5-methylcytidine and 1-methylpseudouridine), Factor IX mRNA having a miR-122 seed sequence in the 3′UTR (FIX seed; mouse 3′ UTR mRNA sequence shown in SEQ ID NO: 5038; polyA tail of approximately 140 nucleotides not shown in sequence; 5′cap, Cap1; fully modified with 5-methylcytidine and 1-methylpseudouridine; human 3′UTR mRNA sequence shown in SEQ ID NO: 5032; polyA tail of approximately 140 nucleotides not shown in sequence; 5′cap, Cap1; fully modified with 5-methylcytidine and 1-methylpseudouridine) or Factor IX mRNA having a miR-122 sequence without the seed sequence in the 3′UTR (FIX seedless; mouse 3′ UTR mRNA sequence shown in SEQ ID NO: 5040; polyA tail of approximately 140 nucleotides not shown in sequence; 5′cap, Cap1; fully modified with 5-methylcytidine and 1-methylpseudouridine; human 3′UTR mRNA sequence shown in SEQ ID NO: 5034; polyA tail of approximately 140 nucleotides not shown in sequence; 5′cap, Cap1; fully modified with 5-methylcytidine and 1-methylpseudouridine) were transfected with 1 ul per well of Lipofectamine 2000 at a concentration of 500 ng per well in 24 well plates for the primary human hepatocytes and the primary rat hepatocytes. The supernatant was collected at 24 hours, 48 hours and 72 hours after transfection, expression of G-CSF and Factor IX was measured by ELISA, and the results are shown in Table 49. The mir-122 binding site sequence in the mRNA dampened the G-CSF and Factor IX protein expression in the primary hepatocytes.

TABLE 49
G-CSF Expression in Hepatocytes

| | | Primary Human | Primary Human |
|---|---|---|---|
| | | Hepatocytes | Hepatocytes |
| | | Protein Expression | Protein Expression |
| | | (ng/ml) | (ng/ml) |
| Description | Time Point | Mm 3′UTR | Hs 3′UTR |
| G-CSF | 24 hours | 43.9 | 84.9 |
| | 48 hours | 18.8 | 100.4 |
| | 72 hours | 5.7 | 21.3 |
| G-CSF miR122 | 24 hours | 6.9 | 24.0 |
| | 48 hours | .7 | 3.03 |
| | 72 hours | .12 | .88 |
| G-CSF seed | 24 hours | 48.5 | 115.8 |
| | 48 hours | 25.6 | 96.4 |
| | 72 hours | 8.2 | 19.2 |
| G-CSF seedless | 24 hours | 31.7 | 113.1 |
| | 48 hours | 11.7 | 92.9 |
| | 72 hours | 3.4 | 18.9 |
| FIX | 24 hours | 90.8 | 63.2 |
| | 48 hours | 159.6 | 124.8 |
| | 72 hours | 70.5 | 44.3 |
| FIX mir122 | 24 hours | 11.8 | 15.9 |
| | 48 hours | 5.0 | 4.4 |
| | 72 hours | 1.0 | .4 |
| FIX seed | 24 hours | 77.2 | 60.2 |
| | 48 hours | 115.0 | 63.0 |
| | 72 hours | 41.7 | 20.1 |
| FIX seedless | 24 hours | 69.3 | 53.7 |
| | 48 hours | 123.8 | 75.0 |
| | 72 hours | 49.0 | 24.5 |

### Example 47. Time Course of Modified Nucleic Acids with a Mir-122 Sequence in Cancer Cells

A. Base Level of miR-122

[1062] The base level of mir-122 in Human hepatocytes, rat hepatocytes, human hepatocellular carcinoma cells (Hep3B) and HeLa cells were determined by TAQMAN® analysis using the manufacturers protocol. The levels were normalized to U6 and the results are shown in Table 50.

TABLE 50
miR-122 Levels in Various Cell Types

| Cell Type | miR-122 level (normalized to U6) |
|---|---|
| Human | 16.8 |
| Hepatocytes | |
| Rat Hepatocytes | 10.9 |
| Hep3B | 0 |
| HeLa | 0 |

### B. Primary Human Hepatocytes and Hep3B Cells

[1063] Primary human hepatocytes were seeded at a density of 50,000 cells per well in 100 ul cell culture medium (InvitroGRO CP and InVitroGRO HI Medium+2.2% Torpedo Antibiotic Mix) and Hep3B cells were seeded at a density of 20,000 cells per well in 100 ul cell culture medium MEM+10% FBS. G-CSF mRNA without a miR-122 sequence in the 3′UTR (G-CSF; mRNA sequence shown in SEQ ID NO: 5745; polyA tail of approximately 140 nucleotides not shown in sequence; 5′cap, cap1; fully modified with 5-methylcytidine and 1-methylpseudouridine), G-CSF mRNA having a miR-122 sequence in the 3′UTR (G-CSF miR122; mRNA sequence shown in SEQ ID NO: 5018; polyA tail of approximately 140 nucleotides not shown in sequence; 5′cap, cap1; fully modified with 5-methylcytidine and 1-methylpseudouridine), G-CSF mRNA having a miR-122 seed sequence in the 3′UTR (G-CSF seed; mRNA sequence shown in SEQ ID NO: 5020; polyA tail of approximately 140 nucleotides not shown in sequence; 5′cap, cap1; fully modified with 5-methylcytidine and 1-methylpseudouridine) or G-CSF mRNA having a miR-122 sequence without the seed sequence in the 3′UTR (G-CSF seedless; mRNA sequence shown in SEQ ID NO: 5022; polyA tail of approximately 140 nucleotides not shown in sequence; 5′cap, Cap1; fully modified with 5-methylcytidine and 1-methylpseudouridine) were transfected with 0.3 μl per well of Lipofectamine 2000 at a concentration of 75 ng of mRNA per well in 96 well plates for the primary human hepatocytes and the Hep3B cells. The supernatant was collected at 24 hours, 48 hours and 72 hours after transfection, expression of G-CSF was measured by ELISA, and the results are shown in Table 51. The mir-122 binding site sequence in the mRNA dampened the G-CSF protein expression in the primary human hepatocytes but not in the Hep3B cells.

TABLE 51
G-CSF Expression

| | | Primary | |
|---|---|---|---|
| | | Human | |
| | | Hepatocytes | Hep3B |
| | | Protein | Protein |
| | | Expression | Expression |
| | | (ng/ml) | (ng/ml) |
| Description | Time Point | Hs 3′UTR | Hs 3′UTR |
| G-CSF | 24 hours | 76 | 55 |
| | 48 hours | 12 | 33 |
| | 72 hours | 6 | 10 |
| G-CSF miR122 | 24 hours | 32 | 37 |
| | 48 hours | 1 | 27 |
| | 72 hours | 0 | 6 |
| G-CSF seed | 24 hours | 75 | 39 |
| | 48 hours | 11 | 28 |
| | 72 hours | 4 | 6 |
| G-CSF seedless | 24 hours | 79 | 49 |
| | 48 hours | 15 | 35 |
| | 72 hours | 6 | 9 |

### Example 48. Time Course of Modified Nucleic Acids with a Mir-142 3p Sequence

A. Base Level of miR-143 3p

[1064] The base level of miR-142 3p in RAW264.7 cells and HeLa cells were determined by TAQMAN® analysis using the manufacturer's protocol. The levels were normalized to U6 and the results are shown in Table 52.

TABLE 52
miR-142 3p Levels in Various Cell Types

| | miR-122 level |
|---|---|
| Cell Type | (normalized to U6) |
| Human | 16.8 |
| Hepatocytes | |
| Rat Hepatocytes | 10.9 |
| Hep3B | 0 |
| HeLa | 0 |

### B. HeLa and RAW264.7 Cells

[1065] HeLa cells were seeded at a density of 17,000 per well in 100 μl cell culture medium DMEM+10% FBS and RAW264.7 cells were seeded at a density of 200,000 per well in 100 μl cell culture medium DMEM+10% FBS. G-CSF mRNA without a miR-142 3p sequence in the 3′UTR (G-CSF; mRNA sequence shown in SEQ ID NO: 5749; polyA tail of approximately 140 nucleotides not shown in sequence; 5′cap, Cap1; fully modified with 5-methylcytidine and 1-methylpseudouridine), G-CSF mRNA having a miR-142 3p sequence in the 3′UTR (G-CSF miR142 3p; mRNA sequence shown in SEQ ID NO: 5750; polyA tail of approximately 140 nucleotides not shown in sequence; 5′cap, Cap1; fully modified with 5-methylcytidine and 1-methylpseudouridine), G-CSF mRNA having a miR-142 3p seed sequence in the 3′UTR (G-CSF seed; mRNA sequence shown in SEQ ID NO: 5751; polyA tail of approximately 140 nucleotides not shown in sequence; 5′cap, cap1; fully modified with 5-methylcytidine and 1-methylpseudouridine) or G-CSF mRNA having a miR-142 3p sequence without the seed sequence in the 3′UTR (G-CSF seedless; mRNA sequence shown in SEQ ID NO: 5752; polyA tail of approximately 140 nucleotides not shown in sequence; 5′cap, Cap1; fully modified with 5-methylcytidine and 1-methylpseudouridine) were transfected with 0.3 μl per well of Lipofectamine 2000 at a concentration of 75 ng of mRNA per well in 96 well plates for HeLa or with 1 μl per well of Lipofectamine 2000 at a concentration of 250 ng of mRNA per well in 24 well plates for RAW264.7 cells. The supernatant was collected 16-18 hours after transfection, expression of G-CSF was measured by ELISA, and the results are shown in Table 53. miR-142 3p sites in G-CSF were shown to down-regulate G-CSF expression in RAW264.7 cells.

TABLE 53
Expression

| | HeLa | RAW264.7 |
|---|---|---|
| | Protein | Protein |
| | Expression | Expression |
| Description | (ng/ml) | (ng/ml) |
| G-CSF | 243.5 | 124.8 |
| G-CSF miR142 3p | 309.1 | 42.8 |
| G-CSF seed | 259.8 | 148.1 |
| G-CSF seedless | 321.7 | 185.2 |

### C. Time Course in RAW264.7 Cells

[1066] RAW264.7 cells were seeded at a density of 60,000 cells per well in 100 μl cell culture medium (DMEM+10% FBS). G-CSF mRNA without a miR-142 3p sequence in the 3′UTR (G-CSF; mRNA sequence shown in SEQ ID NO: 5749; polyA tail of approximately 140 nucleotides not shown in sequence; 5′cap, cap1; fully modified with 5-methylcytidine and 1-methylpseudouridine), G-CSF mRNA having a miR-142 3p sequence in the 3′UTR (G-CSF miR142 3p; mRNA sequence shown in SEQ ID NO: 5750; polyA tail of approximately 140 nucleotides not shown in sequence; 5′cap, Cap1; fully modified with 5-methylcytidine and 1-methylpseudouridine), G-CSF mRNA having a miR-142 3p seed sequence in the 3′UTR (G-CSF seed; mRNA sequence shown in SEQ ID NO: 5751; polyA tail of approximately 140 nucleotides not shown in sequence; 5′cap, cap1; fully modified with 5-methylcytidine and 1-methylpseudouridine) or G-CSF mRNA having a miR-142 3p sequence without the seed sequence in the 3′UTR (G-CSF seedless; mRNA sequence shown in SEQ ID NO: 5752; polyA tail of approximately 140 nucleotides not shown in sequence; 5′cap, cap1; fully modified with 5-methylcytidine and 1-methylpseudouridine) were transfected with 0.3 μl per well of Lipofectamine 2000 at a concentration of 75 ng of mRNA per well in 96 well plates. The supernatant was collected at 24 hours, 48 hours and 72 hours after transfection, expression of G-CSF was measured by ELISA, and the results are shown in Table 54. The mir-142 3p binding site sequence in the mRNA showed a strong suppression of G-CSF expression in RAW264.7 cells over time.

TABLE 54
G-CSF Expression

| | | RAW264.7 Cells |
|---|---|---|
| | | Protein |
| | | Expression |
| Description | Time Point | (ng/ml) |
| G-CSF | 24 hours | 133.5 |
| | 48 hours | 69.7 |
| | 72 hours | 2.1 |
| G-CSF miR142 3p | 24 hours | 60.1 |
| | 48 hours | 9.2 |
| | 72 hours | .3 |
| G-CSF seed | 24 hours | 244.9 |
| | 48 hours | 68.9 |
| | 72 hours | 2.3 |
| G-CSF seedless | 24 hours | 250.2 |
| | 48 hours | 95.9 |
| | 72 hours | 3.0 |

D. miR-142 3p in PBMC

[1067] Peripheral blood mononuclear cells (PBMCs) were seeded at a density of 150,000 cells per well in 100 μl cell culture medium (Opti-MEM and after transfection add 10% FBS). G-CSF mRNA having a miR-142 3p sequence in the 3′UTR (G-CSF miR142 3p; mRNA sequence shown in SEQ ID NO: 5750; polyA tail of approximately 140 nucleotides not shown in sequence; 5′cap, Cap1; fully modified with 5-methylcytidine and 1-methylpseudouridine), G-CSF mRNA having a miR-142 3p seed sequence in the 3′UTR (G-CSF seed; mRNA sequence shown in SEQ ID NO: 5751; polyA tail of approximately 140 nucleotides not shown in sequence; 5′cap, cap1; fully modified with 5-methylcytidine and 1-methylpseudouridine) or G-CSF mRNA having a miR-142 3p sequence without the seed sequence in the 3′UTR (G-CSF seedless; mRNA sequence shown in SEQ ID NO: 5752; polyA tail of approximately 140 nucleotides not shown in sequence; 5′cap, cap1; fully modified with 5-methylcytidine and 1-methylpseudouridine) were transfected in triplicate with 0.4 μl per well of Lipofectamine 2000 at a concentration of 500 ng of mRNA per well in 96 well plates for 2 or 3 donors. The supernatant was collected at 24 hours after transfection and the expression of G-CSF was measured by ELISA. The results for the 2 donors are shown in Table 55 and the results for the 3 donors are shown in Table 56. The mir-142 3p binding site sequence in the mRNA was shown to down regulate G-CSF expression in human PBMC.

TABLE 55
Expression PBMC (2 donors)

| | Protein |
|---|---|
| | Expression |
| Description | (ng/ml) |
| G-CSF miR142 3p | 5.09 |
| G-CSF seed | 10.06 |
| G-CSF seedless | 9.38 |

TABLE 56
Expression PBMC (3 donors)

| | Protein |
|---|---|
| | Expression |
| Description | (ng/ml) |
| G-CSF miR142 3p | 7.48 |
| G-CSF seed | 13.40 |
| G-CSF seedless | 13.98 |

### Example 49. In Vivo Expression of Modified mRNA

### A. BALB/C Nuce Mice

[1068] BALB/c nude mice were injected intravenously with 0.1 mg/kg luciferase modified mRNA without a miR-122 binding site (“non-targeted mRNA”; mRNA sequence shown in SEQ ID NO: 5753; polyA tail of approximately 140 nucleotides not shown in sequence; 5′ cap, Cap1; fully modified with 5-methylcytidine and 1-methylpeudouridine) formulated in a lipid nanoparticle described in Table 57 or luciferase modified mRNA with a miR-122 binding site in the 3′UTR (“miR-122 targeted mRNA”; mRNA sequence shown in SEQ ID NO: 5754; polyA tail of approximately 140 nucleotides not shown in sequence; 5′ cap, Cap1; fully modified with 5-methylcytidine and 1-methylpeudouridine) formulated in a lipid nanoparticle described in Table 58.

TABLE 57
Lipid Nanoparticle for Non-targeted mRNA

| LNP | Luciferase: non-targeted mRNA |
|---|---|
| Lipid | DLin-KC2-DMA |
| Lipid/RNA wt/wt | 20 |
| Mean size | 73.3 nm |
| | PDI: 0.06 |

TABLE 58
Lipid Nanoparticle for Targeted mRNA

| LNP | Luciferase: targeted mRNA |
|---|---|
| Lipid | DLin-KC2-DMA |
| Lipid/RNA wt/wt | 20 |
| Mean size | 70.6 nm |
| | PDI: 0.08 |

[1069] 24 hours post-treatment, animals were anesthetized, injected with the luciferase substrate D-luciferin and the bioluminescence imaging (BLI) from living animals was evaluated in an IVIS imager 15 minutes later. Signals were obtained from animals injected with non-targeted mRNA and from miR-122 targeted mRNA, and presented in Table 59. The total light signal produced from livers of animals treated with miR 122 targeted mRNA is 29× lower than non-targeted mRNA, showing that the engineered element in the 3′UTR may inhibit protein expression in normal tissue.

TABLE 59
In vivo expression of modified mRNA modulated
by an engineered miR122 binding site

| | Luciferase signal |
|---|---|
| | from liver |
| Description | (photons/sec) |
| Non-targeted mRNA | 7.9 × 10⁷ |
| miR-122 targted mRNA | 2.7 × 10⁶ |

B. BALB/c Nude Mice with Hepatocellular Carcinoma Hep3B Cells

[1070] BALB/c nude mice were intrahepatically implanted with 2×10⁶ hepatocellular carcinoma Hep3B cells and resulting orthotopic tumors allowed to grow for 24 days. Tumor-bearing mice were then intravenously injected with 0.1 mg/kg luciferase modified mRNA without a miR-122 binding site (“non-targeted mRNA”; mRNA sequence shown in SEQ ID NO: 5753; polyA tail of approximately 140 nucleotides not shown in sequence; 5′ cap, Cap1; fully modified with 5-methylcytidine and 1-methylpeudouridine) or luciferase modified mRNA with a miR-122 binding site in the 3′UTR (“miR-122 targeted mRNA”; mRNA sequence shown in SEQ ID NO: 5754; polyA tail of approximately 140 nucleotides not shown in sequence; 5′ cap, Cap1; fully modified with 5-methylcytidine and 1-methylpeudouridine) formulated in a lipid nanoparticle described in Table 57 and 58 (above). 24 hr post-treatment animals were anesthetized, injected with the luciferase substrate D-luciferin and bioluminescence imaging (BLI) from living animals was evaluated in an IVIS imager 20 minutes later. Signal from orthotopic tumors compared to adjacent normal liver was quantified, and miR-122-targeted mRNA systemically delivered via lipid nanoparticles achieved over 2-fold enrichment in tumor compared to normal liver.

### Example 50. Effect of the Kozak Sequence in Modified Nucleic Acids

[1071] HeLa cells were seeded at a density of 15,000 per well in 100 μl cell culture medium DMEM+FBS 10%. G-CSF mRNA having a Kozak sequence (G-CSF Kozak; mRNA sequence shown in SEQ ID NO: 5716; polyA tail of approximately 140 nucleotides not shown in sequence; 5′cap, Cap1; fully modified with 5-methylcytidine and 1-methylpseudouridine), G-CSF mRNA not having a Kozak sequence (G-CSF no Kozak; mRNA sequence shown in SEQ ID NO: 5008; polyA tail of approximately 140 nucleotides not shown in sequence; 5′cap, Cap1; fully modified with 5-methylcytidine and 1-methylpseudouridine), G-CSF mRNA where the −3 position A, upsteam of the start codon, was converted to a T, (G-CSF 3t⁵′; mRNA sequence shown in SEQ ID NO: 5755 (Table 60); polyA tail of approximately 140 nucleotides not shown in sequence; 5′cap, Cap1; fully modified with 5-methylcytidine and 1-methylpseudouridine), G-CSF mRNA where the −9 position A, upsteam of the start codon, was converted to a T, (G-CSF 9t5′; mRNA sequence shown in SEQ ID NO: 5756 (Table 60); polyA tail of approximately 140 nucleotides not shown in sequence; 5′cap, Cap1; fully modified with 5-methylcytidine and 1-methylpseudouridine) or G-CSF mRNA where 9 nucleotides upsteam of the start codon (AGAGCCACC) were deleted (G-CSF 9del5′; mRNA sequence shown in SEQ ID NO: 5757 (Table 60); polyA tail of approximately 140 nucleotides not shown in sequence; 5′cap, Cap1; fully modified with 5-methylcytidine and 1-methylpseudouridine) and transfected in triplicate at a concentration of 37.5 ng per well in 96 well plates. 24 hours, 48 hours and 72 hours after transfection, the supernatant was collected and expression of G-CSF was measured by ELISA, and the results are shown in Table 61. In Table 60, the start codon in each sequence is underlined. In Table 60, for G-CSF 3t5′ the −3 position A, upstream of the start codon is in bold and underlined and for G-CSF 9t5′ the −9 position A upstream of the start codon is in bold and underlined.

TABLE 60
G-CSF Sequences

| | | SEQ |
|---|---|---|
| De- | | ID |
| scription | Sequence | NO |
| G-CSF | GGGAAAUAAGAGAGAAAAGAAGAGUAAGAAGAAA | 5755 |
| 3t5′ | UAUAAGAGCCUCCAUGGCCGGUCCCGCGACCCAAA | |
| | GCCCCAUGAAACUUAUGGCCCUGCAGUUGCUGCU | |
| | UUGGCACUCGGCCCUCUGGACAGUCCAAGAAGCG | |
| | ACUCCUCUCGGACCUGCCUCAUCGUUGCCGCAGUC | |
| | AUUCCUUUUGAAGUGUCUGGAGCAGGUGCGAAAG | |
| | AUUCAGGGCGAUGGAGCCGCACUCCAAGAGAAGC | |
| | UCUGCGCGACAUACAAACUUUGCCAUCCCGAGGA | |
| | GCUCGUACUGCUCGGGCACAGCUUGGGGAUUCCC | |
| | UGGGCUCCUCUCUCGUCCUGUCCGUCGCAGGCUUU | |
| | GCAGUUGGCAGGGUGCCUUUCCCAGCUCCACUCCG | |
| | GUUUGUUCUUGUAUCAGGGACUGCUGCAAGCCCU | |
| | UGAGGGAAUCUCGCCAGAAUUGGGCCCGACGCUG | |
| | GACACGUUGCAGCUCGACGUGGCGGAUUUCGCAA | |
| | CAACCAUCUGGCAGCAGAUGGAGGAACUGGGGAU | |
| | GGCACCCGCGCUGCAGCCCACGCAGGGGGCAAUGC | |
| | CGGCCUUUGCGUCCGCGUUUCAGCGCAGGGCGGG | |
| | UGGAGUCCUCGUAGCGAGCCACCUUCAAUCAUUU | |
| | UUGGAAGUCUCGUACCGGGUGCUGAGACAUCUUG | |
| | CGCAGCCGUGAUAAUAGGCUGGAGCCUCGGUGGC | |
| | CAUGCUUCUUGCCCCUUGGGCCUCCCCCCAGCCCC | |
| | UCCUCCCCUUCCUGCACCCGUACCCCCGUGGUCUU | |
| | UGAAUAAAGUCUGAGUGGGCGGC | |
| G-CSF | GGGAAAUAAGAGAGAAAAGAAGAGUAAGAAGAAA | 5756 |
| 9t5′ | UAUAUGAGCCACCAUGGCCGGUCCCGCGACCCAAA | |
| | GCCCCAUGAAACUUAUGGCCCUGCAGUUGCUGCU | |
| | UUGGCACUCGGCCCUCUGGACAGUCCAAGAAGCG | |
| | ACUCCUCUCGGACCUGCCUCAUCGUUGCCGCAGUC | |
| | AUUCCUUUUGAAGUGUCUGGAGCAGGUGCGAAAG | |
| | AUUCAGGGCGAUGGAGCCGCACUCCAAGAGAAGC | |
| | UCUGCGCGACAUACAAACUUUGCCAUCCCGAGGA | |
| | GCUCGUACUGCUCGGGCACAGCUUGGGGAUUCCC | |
| | UGGGCUCCUCUCUCGUCCUGUCCGUCGCAGGCUUU | |
| | GCAGUUGGCAGGGUGCCUUUCCCAGCUCCACUCCG | |
| | GUUUGUUCUUGUAUCAGGGACUGCUGCAAGCCCU | |
| | UGAGGGAAUCUCGCCAGAAUUGGGCCCGACGCUG | |
| | GACACGUUGCAGCUCGACGUGGCGGAUUUCGCAA | |
| | CAACCAUCUGGCAGCAGAUGGAGGAACUGGGGAU | |
| | GGCACCCGCGCUGCAGCCCACGCAGGGGGCAAUGC | |
| | CGGCCUUUGCGUCCGCGUUUCAGCGCAGGGCGGG | |
| | UGGAGUCCUCGUAGCGAGCCACCUUCAAUCAUUU | |
| | UUGGAAGUCUCGUACCGGGUGCUGAGACAUCUUG | |
| | CGCAGCCGUGAUAAUAGGCUGGAGCCUCGGUGGC | |
| | CAUGCUUCUUGCCCCUUGGGCCUCCCCCCAGCCCC | |
| | UCCUCCCCUUCCUGCACCCGUACCCCCGUGGUCUU | |
| | UGAAUAAAGUCUGAGUGGGCGGC | |
| G-CSF | GGGAAAUAAGAGAGAAAAGAAGAGUAAGAAGAAA | 5757 |
| 9del5′ | UAUAAUGGCCGGUCCCGCGACCCAAAGCCCCAUGA | |
| | AACUUAUGGCCCUGCAGUUGCUGCUUUGGCACUC | |
| | GGCCCUCUGGACAGUCCAAGAAGCGACUCCUCUCG | |
| | GACCUGCCUCAUCGUUGCCGCAGUCAUUCCUUUU | |
| | GAAGUGUCUGGAGCAGGUGCGAAAGAUUCAGGGC | |
| | GAUGGAGCCGCACUCCAAGAGAAGCUCUGCGCGA | |
| | CAUACAAACUUUGCCAUCCCGAGGAGCUCGUACU | |
| | GCUCGGGCACAGCUUGGGGAUUCCCUGGGCUCCU | |
| | CUCUCGUCCUGUCCGUCGCAGGCUUUGCAGUUGG | |
| | CAGGGUGCCUUUCCCAGCUCCACUCCGGUUUGUUC | |
| | UUGUAUCAGGGACUGCUGCAAGCCCUUGAGGGAA | |
| | UCUCGCCAGAAUUGGGCCCGACGCUGGACACGUU | |
| | GCAGCUCGACGUGGCGGAUUUCGCAACAACCAUC | |
| | UGGCAGCAGAUGGAGGAACUGGGGAUGGCACCCG | |
| | CGCUGCAGCCCACGCAGGGGGCAAUGCCGGCCUUU | |
| | GCGUCCGCGUUUCAGCGCAGGGCGGGUGGAGUCC | |
| | UCGUAGCGAGCCACCUUCAAUCAUUUUUGGAAGU | |
| | CUCGUACCGGGUGCUGAGACAUCUUGCGCAGCCG | |
| | UGAUAAUAGGCUGGAGCCUCGGUGGCCAUGCUUC | |
| | UUGCCCCUUGGGCCUCCCCCCAGCCCCUCCUCCCC | |
| | UUCCUGCACCCGUACCCCCGUGGUCUUUGAAUAA | |
| | AGUCUGAGUGGGCGGC | |

TABLE 61
G-CSF Expression

| | 24 hours | 48 hours | 72 hours |
|---|---|---|---|
| | Protein | Protein | Protein |
| | Expression | Expression | Expression |
| | (ng/ml) | (ng/ml) | (ng/ml) |
| G-CSF Kozak | 239.08 | 339.89 | 283.43 |
| G-CSF No Kozak | 399.83 | 544.08 | 437.23 |
| G-CSF 3t5′ | 157.39 | 239.67 | 195.20 |
| G-CSF 9t5′ | 171.84 | 263.11 | 195.22 |
| G-CSF 9del5′ | 308.16 | 563.64 | 397.20 |

### Example 51. Effect of Modification of 5′UTR in Modified Nucleic Acids

[1072] BJ Fibroblast cells were seeded at a density of 100,000 per well in 500 μl cell culture medium EMEM+FBS 10%. G-CSF mRNA having a synthetic 5′UTR (G-CSF; mRNA sequence shown in SEQ ID NO: 5716; polyA tail of approximately 140 nucleotides not shown in sequence; 5′cap, Cap1; fully modified with 5-methylcytidine and 1-methylpseudouridine) or G-CSF mRNA containing a 5′UTR with five tandem repeats of an 18 nucleotide sequence from the IRES of the GTX gene (GTX G-CSF; mRNA sequence shown in SEQ ID NO: 5758 (Table 62); polyA tail of approximately 140 nucleotides not shown in sequence; 5′cap, Cap1; fully modified with 5-methylcytidine and 1-methylpseudouridine) and transfected in triplicate at a concentration of 250 ng per well in 24 well plates. 24 hours, 48 hours and 72 hours after transfection, the supernatant was collected and expression of G-CSF was measured by ELISA, and the results are shown in Table 63. In Table 62, the start codon is underlined and the five tandem repeats of an 18 nucleotide sequence from the IRES of the GTX gene is bolded and the first, third and fifth tandem repeat of the 18 nucleotide sequence is also underlined.

TABLE 62
GTX G-CSF Sequence

| | | SEQ |
|---|---|---|
| De- | | ID |
| scription | Sequence | NO |
| GTX G- | GGGAAAUUCUGACAUCCGGCGGAAUUCUGACAU | 5758 |
| CSF | CCGGCGGAAUUCUGACAUCCGGCGGAAUUCUGA | |
| | CAUCCGGCGGAAUUCUGACAUCCGGCGGAAGAC | |
| | UCACAACCCCAGAAACAGACAUUAAGAGAGAAAA | |
| | GAAGAGUAAGAAGAAAUAUAAGAGCCACCAUGGC | |
| | CGGUCCCGCGACCCAAAGCCCCAUGAAACUUAUGG | |
| | CCCUGCAGUUGCUGCUUUGGCACUCGGCCCUCUGG | |
| | ACAGUCCAAGAAGCGACUCCUCUCGGACCUGCCUC | |
| | AUCGUUGCCGCAGUCAUUCCUUUUGAAGUGUCUG | |
| | GAGCAGGUGCGAAAGAUUCAGGGCGAUGGAGCCG | |
| | CACUCCAAGAGAAGCUCUGCGCGACAUACAAACU | |
| | UUGCCAUCCCGAGGAGCUCGUACUGCUCGGGCAC | |
| | AGCUUGGGGAUUCCCUGGGCUCCUCUCUCGUCCU | |
| | GUCCGUCGCAGGCUUUGCAGUUGGCAGGGUGCCU | |
| | UUCCCAGCUCCACUCCGGUUUGUUCUUGUAUCAG | |
| | GGACUGCUGCAAGCCCUUGAGGGAAUCUCGCCAG | |
| | AAUUGGGCCCGACGCUGGACACGUUGCAGCUCGA | |
| | CGUGGCGGAUUUCGCAACAACCAUCUGGCAGCAG | |
| | AUGGAGGAACUGGGGAUGGCACCCGCGCUGCAGC | |
| | CCACGCAGGGGGCAAUGCCGGCCUUUGCGUCCGCG | |
| | UUUCAGCGCAGGGCGGGUGGAGUCCUCGUAGCGA | |
| | GCCACCUUCAAUCAUUUUUGGAAGUCUCGUACCG | |
| | GGUGCUGAGACAUCUUGCGCAGCCGUGAUAAUAG | |
| | GCUGGAGCCUCGGUGGCCAUGCUUCUUGCCCCUU | |
| | GGGCCUCCCCCCAGCCCCUCCUCCCCUUCCUGCAC | |
| | CCGUACCCCCGUGGUCUUUGAAUAAAGUCUGAGU | |
| | GGGCGGC | |

TABLE 63
5′ UTR

| | G-CSF | Gtx G-CSF |
|---|---|---|
| | Protein | Protein |
| | Expression | Expression |
| Time point | (ng/ml) | (ng/ml) |
| 24 hours | 26.13 | 79.65 |
| 48 hours | 138.75 | 444.81 |
| 72 hours | 55.37 | 198.14 |

### Example 53. Effect of Modification of 5′UTR in Modified Nucleic Acids

[1073] BJ Fibroblast cells were seeded at a density of 100,000 per well in 500 μl cell culture medium EMEM+FBS 10%. G-CSF mRNA having a synthetic 5′UTR (G-CSF; mRNA sequence shown in SEQ ID NO: 5716; polyA tail of approximately 140 nucleotides not shown in sequence; 5′cap, Cap1; fully modified with 1-methylpseudouridine) or G-CSF mRNA containing a 5′UTR with five tandem repeats of an 18 nucleotide sequence from the IRES of Gtx gene (Gtx G-CSF; mRNA sequence shown in SEQ ID NO: 5758 (Table 62); polyA tail of approximately 140 nucleotides not shown in sequence; 5′cap, Cap1; fully modified with 1-methylpseudouridine) and transfected in triplicate at a concentration of 250 ng per well in 24 well plates. 24 hours, 48 hours and 72 hours after transfection, the supernatant was collected and expression of G-CSF was measured by ELISA, and the results are shown in Table 64.

TABLE 64
5′ UTR

| | G-CSF | Gtx G-CSF |
|---|---|---|
| | Protein | Protein |
| | Expression | Expression |
| Time point | (ng/ml) | (ng/ml) |
| 24 hours | 129.10 | 178.68 |
| 48 hours | 569.97 | 1067.62 |
| 72 hours | 325.16 | 738.30 |

### Example 54. In Vivo Effect of the Modification of 5′UTR in Nucleic Acids Modified with 5-Methylcytidine and 1-Methylpseudouridine

[1074] To study the effect of the modification of the 5′UTR in modified nucleic acids female Balb/c mice (n=3; 12 weeks old; Harlan Laboratories (South Easton, MA)) were treated with lipoplexed mRNA.

[1075] 8 ug of G-CSF mRNA having a synthetic 5′UTR (G-CSF; mRNA sequence shown in SEQ ID NO: 5716; polyA tail of approximately 140 nucleotides not shown in sequence; 5′cap, Cap1; fully modified with 5-methylcytidine and 1-methylpseudouridine) or G-CSF mRNA where 9 nucleotides upsteam of the start codon were deleted (G-CSF 9del5′; mRNA sequence shown in SEQ ID NO: 5757 (Table 60); polyA tail of approximately 140 nucleotides not shown in sequence; 5′cap, Cap1; fully modified with 5-methylcytidine and 1-methylpseudouridine) for treatment of 3 mice is diluted with sterile and serum-free DMEM (Life Technologies) to obtain a total volume of 200 μl. A total of 8 μl of Lipofectamine2000 (LifeTechnologies, 11668019) for the treatment of 3 mice was diluted with sterile and serum-free DMEM (LifeTechnologies, Grand Island, NY; 11965-118) to obtain a total volume of 200 μl. After 5 minutes of incubation, the two solutions were combined and carefully mixed with a pipette. After 20 minutes the formation of mRNA-Lipofectamine2000 lipoplexes was completed. The lipoplex solution was transferred to a sterile 1 ml syringe (BD Falcon) carrying a 27 gauge injection needle (0.3 mL BD SafetyGlide insulin syringe with 29 G×½ in BD permanently attached needle (Catalog #305935)). The Balb/C mice were placed under a heat lamp for 5 minutes prior to the 100 μl intravenous tail vein injection containing 2 μg of lipoplexed mRNA. 6 hours after injection the mice were anesthesized and bleed for serum collection by cardiac puncture. The serum samples were then run on a G-CSF ELISA (R&D systems catalog #SCS50) and the results are shown in Table 65. The G-CSF mRNA having the 9 nucleotides upsteam of the start codon deleted had a higher G-CSF expression level at 6 hours as compared to the G-CSF having a synthetic UTR.

TABLE 65
G-CSF Kozak Expression In Vivo

| | G-CSF | G-CSF 9del5′ |
|---|---|---|
| | Expression | Expression |
| Time Point | (ng/ml) | (ng/ml) |
| 6 hours | 256.2 | 752.4 |

### Example 55. In Vivo Effect of the GTX Modification of 5′UTR in G-CSF Nucleic Acids Modified with 5-Methylcytidine and 1-Methylpseudouridine

[1076] To study the effect of the modification of the 5′UTR in modified nucleic acids female Balb/c mice (n=3; 12 weeks old; Harlan Laboratories (South Easton, MA)) were treated with lipoplexed mRNA.

[1077] 8 ug of G-CSF mRNA having a synthetic 5′UTR (G-CSF; mRNA sequence shown in SEQ ID NO: 5716; polyA tail of approximately 140 nucleotides not shown in sequence; 5′cap, Cap1; fully modified with 5-methylcytidine and 1-methylpseudouridine) or G-CSF mRNA containing a 5′UTR with five tandem repeats of an 18 nucleotide sequence from the IRES of GTX gene (GTX G-CSF; mRNA sequence shown in SEQ ID NO: 5758 (Table 62); polyA tail of approximately 140 nucleotides not shown in sequence; 5′cap, Cap1; fully modified with 5-methylcytidine and 1-methylpseudouridine) for treatment of 3 mice is diluted with sterile and serum-free DMEM (Life Technologies) to obtain a total volume of 200 μl. A total of 8 μl of Lipofectamine2000 (LifeTechnologies, 11668019) for the treatment of 3 mice was diluted with sterile and serum-free DMEM (LifeTechnologies, Grand Island, NY; 11965-118) to obtain a total volume of 200 μl. After 5 minutes of incubation, the two solutions were combined and carefully mixed with a pipette. After 20 minutes the formation of mRNA-Lipofectamine2000 lipoplexes was completed. The lipoplex solution was transferred to a sterile 1 ml syringe (BD Falcon) carrying a 27 gauge injection needle (0.3 mL BD SafetyGlide insulin syringe with 29 G×½ in BD permanently attached needle (Catalog #305935)). The Balb/C mice were placed under a heat lamp for 5 minutes prior to the 100 μl intravenous tail vein injection containing 2 μg of lipoplexed mRNA. 6 hours after injection the mice were anesthesized and bleed for serum collection by cardiac puncture. The serum samples were then run on a G-CSF ELISA (R&D systems catalog #SCS50) and the results are shown in Table 66. The G-CSF mRNA having five tandem repeats of an 18 nucleotide sequence from the IRES of GTX gene had a higher G-CSF expression level at 6 hours as compared to the G-CSF having a synthetic UTR.

TABLE 66
GTX G-CSF Expression In Vivo

| | G-CSF | GTX G-CSF |
|---|---|---|
| | Expression | Expression |
| Time Point | (ng/ml) | (ng/ml) |
| 6 hours | 266.4 | 1284.4 |

### Example 56. In Vivo Effect of the GTX Modification of 5′UTR in G-CSF Nucleic Acids Modified with 1-Methylpseudouridine

[1078] To study the effect of the modification of the 5′UTR in modified nucleic acids female Balb/c mice (n=3; 12 weeks old; Harlan Laboratories (South Easton, MA)) were treated with lipoplexed mRNA.

[1079] 8 ug of G-CSF mRNA having a synthetic 5′UTR (G-CSF; mRNA sequence shown in SEQ ID NO: 5716; polyA tail of approximately 140 nucleotides not shown in sequence; 5′cap, Cap1; fully modified with 1-methylpseudouridine) or G-CSF mRNA containing a 5′UTR with five tandem repeats of an 18 nucleotide sequence from the IRES of GTX gene (GTX G-CSF; mRNA sequence shown in SEQ ID NO: 5758 (Table 62); polyA tail of approximately 140 nucleotides not shown in sequence; 5′cap, Cap1; fully modified with 1-methylpseudouridine) for treatment of 3 mice is diluted with sterile and serum-free DMEM (Life Technologies) to obtain a total volume of 200 μl. A total of 8 μl of Lipofectamine2000 (LifeTechnologies, 11668019) for the treatment of 3 mice was diluted with sterile and serum-free DMEM (LifeTechnologies, Grand Island, NY; 11965-118) to obtain a total volume of 200 μl. After 5 minutes of incubation, the two solutions were combined and carefully mixed with a pipette. After 20 minutes the formation of mRNA-Lipofectamine2000 lipoplexes was completed. The lipoplex solution was transferred to a sterile 1 ml syringe (BD Falcon) carrying a 27 gauge injection needle (0.3 mL BD SafetyGlide insulin syringe with 29 G×½ in BD permanently attached needle (Catalog #305935)). The Balb/C mice were placed under a heat lamp for 5 minutes prior to the 100 μl intravenous tail vein injection containing 2 μg of lipoplexed mRNA. 6 hours after injection the mice were anesthesized and bleed for serum collection by cardiac puncture. The serum samples were then run on a G-CSF ELISA (R&D systems catalog #SCS50) and the results are shown in Table 67. The G-CSF mRNA having five tandem repeats of an 18 nucleotide sequence from the IRES of GTX gene had a higher G-CSF expression level at 6 hours as compared to the G-CSF having a synthetic UTR.

TABLE 67
GTX G-CSF Expression In Vivo

| | G-CSF | GTX G-CSF |
|---|---|---|
| | Expression | Expression |
| Time Point | (ng/ml) | (ng/ml) |
| 6 hours | 5638.2 | 6281.1 |

### OTHER EMBODIMENTS

[1080] It is to be understood that the words which have been used are words of description rather than limitation, and that changes may be made within the purview of the appended claims without departing from the true scope and spirit of the invention in its broader aspects.

[1081] While the present invention has been described at some length and with some particularity with respect to the several described embodiments, it is not intended that it should be limited to any such particulars or embodiments or any particular embodiment, but it is to be construed with references to the appended claims so as to provide the broadest possible interpretation of such claims in view of the prior art and, therefore, to effectively encompass the intended scope of the invention.

[1082] All publications, patent applications, patents, databases, database entries, other references and art mentioned herein are incorporated by reference in their entirety, even if not expressly stated in the citation. In case of conflict, the present specification, including definitions, will control. In addition, section headings, the materials, methods, and examples are illustrative only and not intended to be limiting.

The application's sequence listing, which the Patent Office published only in electronic form, follows.

SEQUENCE LISTING (5758 sequences)

SEQ ID NO: 1 - DNA, 10 bp, Homo sapiens
  source 1..10: mol_type = genomic DNA
tttttctttt

SEQ ID NO: 2 - DNA, 11 bp, Homo sapiens
  source 1..11: mol_type = genomic DNA
ttttgcttttt

SEQ ID NO: 3 - DNA, 10 bp, Homo sapiens
  source 1..10: mol_type = genomic DNA
ttttgctttt

SEQ ID NO: 4 - DNA, 11 bp, Homo sapiens
  source 1..11: mol_type = genomic DNA
aaaaagcaaaa

SEQ ID NO: 5 - DNA, 47 bp, Homo sapiens
  source 1..47: mol_type = genomic DNA
gggaaataagagagaaaagaagagtaagaagaaatataagagccacc

SEQ ID NO: 6 - DNA, 47 bp, Homo sapiens
  source 1..47: mol_type = genomic DNA
gggagatcagagagaaaagaagagtaagaagaaatataagagccacc

SEQ ID NO: 7 - DNA, 145 bp, Homo sapiens
  source 1..145: mol_type = genomic DNA
ggaataaaagtctcaacacaacatatacaaaacaaacgaatctcaagcaatcaagcattctacttctattgcagcaatttaaatcatttcttttaaagcaaaagcaattttctgaaaattttcaccatttacgaacgatagcaac

SEQ ID NO: 8 - RNA, 42 nt, Homo sapiens
  source 1..42: mol_type = genomic RNA
gggagacaagcttggcattccggtactgttggtaaagccacc

SEQ ID NO: 9 - DNA, 371 bp, Homo sapiens
  source 1..371: mol_type = genomic DNA
gcgcctgcccacctgccaccgactgctggaacccagccagtgggagggcctggcccaccagagtcctgctccctcactcctcgccccgccccctgtcccagagtcccacctgggggctctctccacccttctcagagttccagtttcaaccagagttccaaccaatgggctccatcctctggattctggccaatgaaatatctccctggcagggtcctcttcttttcccagagctccaccccaaccaggagctctagttaatggagagctcccagcacactcggagcttgtgctttgtctccacgcaaagcgataaataaaagcattggtggcctttggtctttgaataaagcctgagtaggaagtctaga

SEQ ID NO: 10 - DNA, 568 bp, Homo sapiens
  source 1..568: mol_type = genomic DNA
gcccctgccgctcccacccccacccatctgggccccgggttcaagagagagcggggtctgatctcgtgtagccatatagagtttgcttctgagtgtctgctttgtttagtagaggtgggcaggaggagctgaggggctggggctggggtgttgaagttggctttgcatgcccagcgatgcgcctccctgtgggatgtcatcaccctgggaaccgggagtggcccttggctcactgtgttctgcatggtttggatctgaattaattgtcctttcttctaaatcccaaccgaacttcttccaacctccaaactggctgtaaccccaaatccaagccattaactacacctgacagtagcaattgtctgattaatcactggccccttgaagacagcagaatgtccctttgcaatgaggaggagatctgggctgggcgggccagctggggaagcatttgactatctggaacttgtgtgtgcctcctcaggtatggcagtgactcacctggttttaataaaacaacctgcaacatctcatggtctttgaataaagcctgagtaggaagtctaga

SEQ ID NO: 11 - DNA, 289 bp, Homo sapiens
  source 1..289: mol_type = genomic DNA
acacactccacctccagcacgcgacttctcaggacgacgaatcttctcaatgggggggcggctgagctccagccaccccgcagtcactttctttgtaacaacttccgttgctgccatcgtaaactgacacagtgtttataacgtgtacatacattaacttattacctcattttgttatttttcgaaacaaagccctgtggaagaaaatggaaaacttgaagaagcattaaagtcattctgttaagctgcgtaaatggtctttgaataaagcctgagtaggaagtctaga

SEQ ID NO: 12 - DNA, 379 bp, Homo sapiens
  source 1..379: mol_type = genomic DNA
catcacatttaaaagcatctcagcctaccatgagaataagagaaagaaaatgaagatcaaaagcttattcatctgtttttctttttcgttggtgtaaagccaacaccctgtctaaaaaacataaatttctttaatcattttgcctcttttctctgtgcttcaattaataaaaaatggaaagaatctaatagagtggtacagcactgttatttttcaaagatgtgttgctatcctgaaaattctgtaggttctgtggaagttccagtgttctctcttattccacttcggtagaggatttctagtttcttgtgggctaattaaataaatcattaatactcttctaatggtctttgaataaagcctgagtaggaagtctaga

SEQ ID NO: 13 - DNA, 118 bp, Mus sp.
  source 1..118: mol_type = genomic DNA
gctgccttctgcggggcttgccttctggccatgcccttcttctctcccttgcacctgtacctcttggtctttgaataaagcctgagtaggaaggcggccgctcgagcatgcatctaga

SEQ ID NO: 14 - DNA, 908 bp, Homo sapiens
  source 1..908: mol_type = genomic DNA
gccaagccctccccatcccatgtatttatctctatttaatatttatgtctatttaagcctcatatttaaagacagggaagagcagaacggagccccaggcctctgtgtccttccctgcatttctgagtttcattctcctgcctgtagcagtgagaaaaagctcctgtcctcccatcccctggactgggaggtagataggtaaataccaagtatttattactatgactgctccccagccctggctctgcaatgggcactgggatgagccgctgtgagcccctggtcctgagggtccccacctgggacccttgagagtatcaggtctcccacgtgggagacaagaaatccctgtttaatatttaaacagcagtgttccccatctgggtccttgcacccctcactctggcctcagccgactgcacagcggcccctgcatccccttggctgtgaggcccctggacaagcagaggtggccagagctgggaggcatggccctggggtcccacgaatttgctggggaatctcgtttttcttcttaagacttttgggacatggtttgactcccgaacatcaccgacgcgtctcctgtttttctgggtggcctcgggacacctgccctgcccccacgagggtcaggactgtgactctttttagggccaggcaggtgcctggacatttgccttgctggacggggactggggatgtgggagggagcagacaggaggaatcatgtcaggcctgtgtgtgaaaggaagctccactgtcaccctccacctcttcaccccccactcaccagtgtcccctccactgtcacattgtaactgaacttcaggataataaagtgtttgcctccatggtctttgaataaagcctgagtaggaaggcggccgctcgagcatgcatctaga

SEQ ID NO: 15 - DNA, 835 bp, Homo sapiens
  source 1..835: mol_type = genomic DNA
actcaatctaaattaaaaaagaaagaaatttgaaaaaactttctctttgccatttcttcttcttcttttttaactgaaagctgaatccttccatttcttctgcacatctacttgcttaaattgtgggcaaaagagaaaaagaaggattgatcagagcattgtgcaatacagtttcattaactccttcccccgctcccccaaaaatttgaatttttttttcaacactcttacacctgttatggaaaatgtcaacctttgtaagaaaaccaaaataaaaattgaaaaataaaaaccataaacatttgcaccacttgtggcttttgaatatcttccacagagggaagtttaaaacccaaacttccaaaggtttaaactacctcaaaacactttcccatgagtgtgatccacattgttaggtgctgacctagacagagatgaactgaggtccttgttttgttttgttcataatacaaaggtgctaattaatagtatttcagatacttgaagaatgttgatggtgctagaagaatttgagaagaaatactcctgtattgagttgtatcgtgtggtgtattttttaaaaaatttgatttagcattcatattttccatcttattcccaattaaaagtatgcagattatttgcccaaatcttcttcagattcagcatttgttctttgccagtctcattttcatcttcttccatggttccacagaagctttgtttcttgggcaagcagaaaaattaaattgtacctattttgtatatgtgagatgtttaaataaattgtgaaaaaaatgaaataaagcatgtttggttttccaaaagaacatat

SEQ ID NO: 16 - DNA, 297 bp, Homo sapiens
  source 1..297: mol_type = genomic DNA
cgccgccgcccgggccccgcagtcgagggtcgtgagcccaccccgtccatggtgctaagcgggcccgggtcccacacggccagcaccgctgctcactcggacgacgccctgggcctgcacctctccagctcctcccacggggtccccgtagccccggcccccgcccagccccaggtctccccaggccctccgcaggctgcccggcctccctccccctgcagccatcccaaggctcctgacctacctggcccctgagctctggagcaagccctgacccaataaaggctttgaacccat

SEQ ID NO: 17 - DNA, 602 bp, Homo sapiens
  source 1..602: mol_type = genomic DNA
ggggctagagccctctccgcacagcgtggagacggggcaaggaggggggttattaggattggtggttttgttttgctttgtttaaagccgtgggaaaatggcacaactttacctctgtgggagatgcaacactgagagccaaggggtgggagttgggataatttttatataaaagaagtttttccactttgaattgctaaaagtggcatttttcctatgtgcagtcactcctctcatttctaaaatagggacgtggccaggcacggtggctcatgcctgtaatcccagcactttgggaggccgaggcaggcggctcacgaggtcaggagatcgagactatcctggctaacacggtaaaaccctgtctctactaaaagtacaaaaaattagctgggcgtggtggtgggcacctgtagtcccagctactcgggaggctgaggcaggagaaaggcatgaatccaagaggcagagcttgcagtgagctgagatcacgccattgcactccagcctgggcaacagtgttaagactctgtctcaaatataaataaataaataaataaataaataaataaataaaaataaagcgagatgttgccctcaaa

SEQ ID NO: 18 - DNA, 785 bp, Homo sapiens
  source 1..785: mol_type = genomic DNA
ggccctgccccgtcggactgcccccagaaagcctcctgccccctgccagtgaagtccttcagtgagcccctccccagccagcccttccctggccccgccggatgtataaatgtaaaaatgaaggaattacattttatatgtgagcgagcaagccggcaagcgagcacagtattatttctccatcccctccctgcctgctccttggcacccccatgctgccttcagggagacaggcagggagggcttggggctgcacctcctaccctcccaccagaacgcaccccactgggagagctggtggtgcagccttcccctccctgtataagacactttgccaaggctctcccctctcgccccatccctgcttgcccgctcccacagcttcctgagggctaattctgggaagggagagttctttgctgcccctgtctggaagacgtggctctgggtgaggtaggcgggaaaggatggagtgttttagttcttgggggaggccaccccaaaccccagccccaactccaggggcacctatgagatggccatgctcaacccccctcccagacaggccctccctgtctccagggcccccaccgaggttcccagggctggagacttcctctggtaaacattcctccagcctcccctcccctggggacgccaaggaggtgggccacacccaggaagggaaagcgggcagccccgttttggggacgtgaacgttttaataatttttgctgaattcctttacaactaaataacacagatattgttataaataaaattgt

SEQ ID NO: 19 - DNA, 3001 bp, Homo sapiens
  source 1..3001: mol_type = genomic DNA
atattaaggatcaagctgttagctaataatgccacctctgcagttttgggaacaggcaaataaagtatcagtatacatggtgatgtacatctgtagcaaagctcttggagaaaatgaagactgaagaaagcaaagcaaaaactgtatagagagatttttcaaaagcagtaatccctcaattttaaaaaaggattgaaaattctaaatgtctttctgtgcatattttttgtgttaggaatcaaaagtattttataaaaggagaaagaacagcctcattttagatgtagtcctgttggattttttatgcctcctcagtaaccagaaatgttttaaaaaactaagtgtttaggatttcaagacaacattatacatggctctgaaatatctgacacaatgtaaacattgcaggcacctgcattttatgttttttttttcaacaaatgtgactaatttgaaacttttatgaacttctgagctgtccccttgcaattcaaccgcagtttgaattaatcatatcaaatcagttttaattttttaaattgtacttcagagtctatatttcaagggcacattttctcactactattttaatacattaaaggactaaataatctttcagagatgctggaaacaaatcatttgctttatatgtttcattagaataccaatgaaacatacaacttgaaaattagtaatagtatttttgaagatcccatttctaattggagatctctttaatttcgatcaacttataatgtgtagtactatattaagtgcacttgagtggaattcaacatttgactaataaaatgagttcatcatgttggcaagtgatgtggcaattatctctggtgacaaaagagtaaaatcaaatatttctgcctgttacaaatatcaaggaagacctgctactatgaaatagatgacattaatctgtcttcactgtttataatacggatggattttttttcaaatcagtgtgtgttttgaggtcttatgtaattgatgacatttgagagaaatggtggctttttttagctacctctttgttcatttaagcaccagtaaagatcatgtctttttatagaagtgtagattttctttgtgactttgctatcgtgcctaaagctctaaatataggtgaatgtgtgatgaatactcagattatttgtctctctatataattagtttggtactaagtttctcaaaaaattattaacacatgaaagacaatctctaaaccagaaaaagaagtagtacaaattttgttactgtaatgctcgcgtttagtgagtttaaaacacacagtatcttttggttttataatcagtttctattttgctgtgcctgagattaagatctgtgtatgtgtgtgtgtgtgtgtgtgcgtttgtgtgttaaagcagaaaagacttttttaaaagttttaagtgataaatgcaatttgttaattgatcttagatcactagtaaactcagggctgaattataccatgtatattctattagaagaaagtaaacaccatctttattcctgccctttttcttctctcaaagtagttgtagttatatctagaaagaagcaattttgatttcttgaaaaggtagttcctgcactcagtttaaactaaaaataatcatacttggattttatttatttttgtcatagtaaaaattttaatttatatatatttttatttagtattatcttattctttgctatttgccaatcctttgtcatcaattgtgttaaatgaattgaaaattcatgccctgttcattttattttactttattggttaggatatttaaaggatttttgtatatataatttcttaaattaatattccaaaaggttagtggacttagattataaattatggcaaaaatctaaaaacaacaaaaatgatttttatacattctatttcattattcctctttttccaataagtcatacaattggtagatatgacttattttatttttgtattattcactatatctttatgatatttaagtataaataattaaaaaaatttattgtaccttatagtctgtcaccaaaaaaaaaaaattatctgtaggtagtgaaatgctaatgttgatttgtctttaagggcttgttaactatcctttattttctcatttgtcttaaattaggagtttgtgtttaaattactcatctaagcaaaaaatgtatataaatcccattactgggtatatacccaaaggattataaatcatgctgctataaagacacatgcacacgtatgtttattgcagcactattcacaatagcaaagacttggaaccaacccaaatgtccatcaatgatagacttgattaagaaaatgtgcacatatacaccatggaatactatgcagccataaaaaaggatgagttcatgtcctttgtagggacatggataaagctggaaaccatcattctgagcaaactattgcaaggacagaaaaccaaacactgcatgttctcactcataggtgggaattgaacaatgagaacacttggacacaaggtggggaacaccacacaccagggcctgtcatggggtggggggagtggggagggatagcattaggagatatacctaatgtaaatgatgagttaatgggtgcagcacaccaacatggcacatgtatacatatgtagcaaacctgcacgttgtgcacatgtaccctagaacttaaagtataattaaaaaaaaaaagaaaacagaagctatttataaagaagttatttgctgaaataaatgtgatctttcccattaaaaaaataaagaaattttggggtaaaaaaacacaatatattgtattcttgaaaaattctaagagagtggatgtgaagtgttctcaccacaaaagtgataactaattgaggtaatgcacatattaattagaaagattttgtcattccacaatgtatatatacttaaaaatatgttatacacaataaatacatacattaaaaaataagtaaatgta

SEQ ID NO: 20 - DNA, 1037 bp, Homo sapiens
  source 1..1037: mol_type = genomic DNA
cccaccctgcacgccggcaccaaaccctgtcctcccacccctccccactcatcactaaacagagtaaaatgtgatgcgaattttcccgaccaacctgattcgctagattttttttaaggaaaagcttggaaagccaggacacaacgctgctgcctgctttgtgcagggtcctccggggctcagccctgagttggcatcacctgcgcagggccctctggggctcagccctgagctagtgtcacctgcacagggccctctgaggctcagccctgagctggcgtcacctgtgcagggccctctggggctcagccctgagctggcctcacctgggttccccaccccgggctctcctgccctgccctcctgcccgccctccctcctgcctgcgcagctccttccctaggcacctctgtgctgcatcccaccagcctgagcaagacgccctctcggggcctgtgccgcactagcctccctctcctctgtccccatagctggtttttcccaccaatcctcacctaacagttactttacaattaaactcaaagcaagctcttctcctcagcttggggcagccattggcctctgtctcgttttgggaaaccaaggtcaggaggccgttgcagacataaatctcggcgactcggccccgtctcctgagggtcctgctggtgaccggcctggaccttggccctacagccctggaggccgctgctgaccagcactgaccccgacctcagagagtactcgcaggggcgctggctgcactcaagaccctcgagattaacggtgctaaccccgtctgctcctccctcccgcagagactggggcctggactggacatgagagccccttggtgccacagagggctgtgtcttactagaaacaacgcaaacctctccttcctcagaatagtgatgtgttcgacgttttatcaaaggccccctttctatgttcatgttagttttgctccttctgtgtttttttctgaaccatatccatgttgctgacttttccaaataaaggttttcactcctctc

SEQ ID NO: 21 - DNA, 577 bp, Homo sapiens
  source 1..577: mol_type = genomic DNA
agaggcctgcctccagggctggactgaggcctgagcgctcctgccgcagagctggccgcgccaaataatgtctctgtgagactcgagaactttcatttttttccaggctggttcggatttggggtggattttggttttgttcccctcctccactctcccccaccccctccccgcccttttttttttttttttttaaactggtattttatctttgattctccttcagccctcacccctggttctcatctttcttgatcaacatcttttcttgcctctgtccccttctctcatctcttagctcccctccaacctggggggcagtggtgtggagaagccacaggcctgagatttcatctgctctccttcctggagcccagaggagggcagcagaagggggtggtgtctccaaccccccagcactgaggaagaacggggctcttctcatttcacccctccctttctcccctgcccccaggactgggccacttctgggtggggcagtgggtcccagattggctcacactgagaatgtaagaactacaaacaaaatttctattaaattaaattttgtgtctcc

SEQ ID NO: 22 - DNA, 2212 bp, Homo sapiens
  source 1..2212: mol_type = genomic DNA
ctccctccatcccaacctggctccctcccacccaaccaactttccccccaacccggaaacagacaagcaacccaaactgaaccccctcaaaagccaaaaaatgggagacaatttcacatggactttggaaaatatttttttcctttgcattcatctctcaaacttagtttttatctttgaccaaccgaacatgaccaaaaaccaaaagtgcattcaaccttaccaaaaaaaaaaaaaaaaaaagaataaataaataactttttaaaaaaggaagcttggtccacttgcttgaagacccatgcgggggtaagtccctttctgcccgttgggcttatgaaaccccaatgctgccctttctgctcctttctccacaccccccttggggcctcccctccactccttcccaaatctgtctccccagaagacacaggaaacaatgtattgtctgcccagcaatcaaaggcaatgctcaaacacccaagtggcccccaccctcagcccgctcctgcccgcccagcacccccaggccctgggggacctggggttctcagactgccaaagaagccttgccatctggcgctcccatggctcttgcaacatctccccttcgtttttgagggggtcatgccgggggagccaccagcccctcactgggttcggaggagagtcaggaagggccacgacaaagcagaaacatcggatttggggaacgcgtgtcaatcccttgtgccgcagggctgggcgggagagactgttctgttccttgtgtaactgtgttgctgaaagactacctcgttcttgtcttgatgtgtcaccggggcaactgcctgggggcggggatgggggcagggtggaagcggctccccattttataccaaaggtgctacatctatgtgatgggtggggtggggagggaatcactggtgctatagaaattgagatgcccccccaggccagcaaatgttcctttttgttcaaagtctatttttattccttgatatttttctttttttttttttttttttgtggatggggacttgtgaatttttctaaaggtgctatttaacatgggaggagagcgtgtgcggctccagcccagcccgctgctcactttccaccctctctccacctgcctctggcttctcaggcctctgctctccgacctctctcctctgaaaccctcctccacagctgcagcccatcctcccggctccctcctagtctgtcctgcgtcctctgtccccgggtttcagagacaacttcccaaagcacaaagcagtttttccccctaggggtgggaggaagcaaaagactctgtacctattttgtatgtgtataataatttgagatgtttttaattattttgattgctggaataaagcatgtggaaatgacccaaacataatccgcagtggcctcctaatttccttctttggagttgggggaggggtagacatggggaaggggctttggggtgatgggcttgccttccattcctgccctttccctccccactattctcttctagatccctccataaccccactcccctttctctcacccttcttataccgcaaacctttctacttcctctttcattttctattcttgcaatttccttgcaccttttccaaatcctcttctcccctgcaataccatacaggcaatccacgtgcacaacacacacacacactcttcacatctggggttgtccaaacctcatacccactccccttcaagcccatccactctccaccccctggatgccctgcacttggtggcggtgggatgctcatggatactgggagggtgaggggagtggaacccgtgaggaggacctgggggcctctccttgaactgacatgaagggtcatctggcctctgctcccttctcacccacgctgacctcctgccgaaggagcaacgcaacaggagaggggtctgctgagcctggcgagggtctgggagggaccaggaggaaggcgtgctccctgctcgctgtcctggccctgggggagtgagggagacagacacctgggagagctgtggggaaggcactcgcaccgtgctcttgggaaggaaggagacctggccctgctcaccacggactgggtgcctcgacctcctgaatccccagaacacaacccccctgggctggggtggtctggggaaccatcgtgcccccgcctcccgcctactcctttttaagctt

SEQ ID NO: 23 - DNA, 729 bp, Homo sapiens
  source 1..729: mol_type = genomic DNA
ttggccaggcctgaccctcttggacctttcttctttgccgacaaccactgcccagcagcctctgggacctcggggtcccagggaacccagtccagcctcctggctgttgacttcccattgctcttggagccaccaatcaaagagattcaaagagattcctgcaggccagaggcggaacacacctttatggctggggctctccgtggtgttctggacccagcccctggagacaccattcacttttactgctttgtagtgactcgtgctctccaacctgtcttcctgaaaaaccaaggcccccttcccccacctcttccatggggtgagacttgagcagaacaggggcttccccaagttgcccagaaagactgtctgggtgagaagccatggccagagcttctcccaggcacaggtgttgcaccagggacttctgcttcaagttttggggtaaagacacctggatcagactccaagggctgccctgagtctgggacttctgcctccatggctggtcatgagagcaaaccgtagtcccctggagacagcgactccagagaacctcttgggagacagaagaggcatctgtgcacagctcgatcttctacttgcctgtggggaggggagtgacaggtccacacaccacactgggtcaccctgtcctggatgcctctgaagagagggacagaccgtcagaaactggagagtttctattaaaggtcatttaaacca

SEQ ID NO: 24 - DNA, 847 bp, Homo sapiens
  source 1..847: mol_type = genomic DNA
tcctccgggaccccagccctcaggattcctgatgctccaaggcgactgatgggcgctggatgaagtggcacagtcagcttccctgggggctggtgtcatgttgggctcctggggcgggggcacggcctggcatttcacgcattgctgccaccccaggtccacctgtctccactttcacagcctccaagtctgtggctcttcccttctgtcctccgaggggcttgccttctctcgtgtccagtgaggtgctcagtgatcggcttaacttagagaagcccgccccctccccttctccgtctgtcccaagagggtctgctctgagcctgcgttcctaggtggctcggcctcagctgcctgggttgtggccgccctagcatcctgtatgcccacagctactggaatccccgctgctgctccgggccaagcttctggttgattaatgagggcatggggtggtccctcaagaccttcccctaccttttgtggaaccagtgatgcctcaaagacagtgtcccctccacagctgggtgccaggggcaggggatcctcagtatagccggtgaaccctgataccaggagcctgggcctccctgaacccctggcttccagccatctcatcgccagcctcctcctggacctcttggcccccagccccttccccacacagccccagaagggtcccagagctgaccccactccaggacctaggcccagcccctcagcctcatctggagcccctgaagaccagtcccacccacctttctggcctcatctgacactgctccgcatcctgctgtgtgtcctgttccatgttccggttccatccaaatacactttctggaacaaa

SEQ ID NO: 25 - DNA, 110 bp, Homo sapiens
  source 1..110: mol_type = genomic DNA
gctggagcctcggtggccatgcttcttgccccttgggcctccccccagcccctcctccccttcctgcacccgtacccccgtggtctttgaataaagtctgagtgggcggc

SEQ ID NO: 26 - DNA, 27 bp, Homo sapiens
  source 1..27: mol_type = genomic DNA
ttggaccctcgtacagaagctaatacg

SEQ ID NO: 27 - DNA, 189 bp, Homo sapiens
  source 1..189: mol_type = genomic DNA
ttttttttttttttttttttttttttttttttttttttttttttttttttttttttttttttttttttttttttttttttttttttttttttttttttttttttttttttttttttttttttttttttttttttttttttttttttttttttttttttttcttcctactcaggctttattcaaagacca

SEQ ID NO: 28 - DNA, 20 bp, Homo sapiens
  source 1..20: mol_type = genomic DNA
ccttgaccttctggaacttc

SEQ ID NO: 29 - DNA, 20 bp, Homo sapiens
  source 1..20: mol_type = genomic DNA
ccaagcactgaaacggatat

SEQ ID NO: 30 - DNA, 20 bp, Homo sapiens
  source 1..20: mol_type = genomic DNA
gatgaaaagtgctccaagga

SEQ ID NO: 31 - DNA, 20 bp, Homo sapiens
  source 1..20: mol_type = genomic DNA
aaccgtgatgaaaaggtacc

SEQ ID NO: 32 - DNA, 20 bp, Homo sapiens
  source 1..20: mol_type = genomic DNA
tcatgcagattggaaaggtc

SEQ ID NO: 33 - DNA, 20 bp, Homo sapiens
  source 1..20: mol_type = genomic DNA
cttcttggactgtccagagg

SEQ ID NO: 34 - DNA, 20 bp, Homo sapiens
  source 1..20: mol_type = genomic DNA
gcagtccctgatacaagaac

SEQ ID NO: 35 - DNA, 20 bp, Homo sapiens
  source 1..20: mol_type = genomic DNA
gattgaaggtggctcgctac

SEQ ID NO: 36 - DNA, 75 bp, Homo sapiens
  source 1..75: mol_type = genomic DNA
atgatgccatcctcagtctcatggggtattttgctcttggcgggtctgtgctgtctcgtgccggtgtcgctcgca

SEQ ID NO: 37 - DNA, 90 bp, Homo sapiens
  source 1..90: mol_type = genomic DNA
atggccggaccggcgactcagtcgcccatgaaactcatggccctgcagttgttgctttggcactcagccctctggaccgtccaagaggcg

SEQ ID NO: 38 - DNA, 137 bp, Homo sapiens
  source 1..137: mol_type = genomic DNA
atgcagagagtgaacatgattatggccgagtccccatcgctcatcacaatctgcctgcttggtacctgctttccgccgaatgcactgtctttctggatcacgagaatgcgaataagatcttgaaccgacccaaacgg

SEQ ID NO: 39 - DNA, 63 bp, Homo sapiens
  source 1..63: mol_type = genomic DNA
atgaaaggatcattgctgttgctcctcgtgtcgaaccttctgctttgccagtccgtagccccc

SEQ ID NO: 40 - DNA, 72 bp, Homo sapiens
  source 1..72: mol_type = genomic DNA
atgaaatgggtgacgttcatctcactgttgtttttgttctcgtccgcctactccaggggagtattccgccga

SEQ ID NO: 41 - DNA, 63 bp, Homo sapiens
  source 1..63: mol_type = genomic DNA
atgtggtggcggctctggtggctgctcctgttgctcctcttgctgtggcccatggtgtgggca

SEQ ID NO: 42 - DNA, 95 bp, Homo sapiens
  source 1..95: mol_type = genomic DNA
tgctctttaacctccgcatcctgttgaataacgctgcgttccgaaatgggcataacttcatggtacgcaacttcagatgcggccagccactccag

SEQ ID NO: 43 - DNA, 87 bp, Homo sapiens
  source 1..87: mol_type = genomic DNA
atgtccgtcttgacacccctgctcttgagagggctgacggggtccgctagacgcctgccggtaccgcgagcgaagatccactccctg

SEQ ID NO: 44 - DNA, 87 bp, Homo sapiens
  source 1..87: mol_type = genomic DNA
atgagcgtgctcactccgttgcttcttcgagggcttacgggatcggctcggaggttgcccgtcccgagagcgaagatccattcgttg

SEQ ID NO: 45 - DNA, 175 bp, synthetic construct
  misc_feature 1..175: note = Description of Artificial Sequence:
  source 1..175: mol_type = other DNA
tgacaaaaataactttatctccccagaattttagaatccaaaaacaggaaaccacactactaaaagaaaaatcaaccgagaaaaattctttagcaaaaagtattctcgcagtaaaaatcacttcatcgaattaaggtcaaaattatcggaacgttttatttcgcataagaacact

SEQ ID NO: 46 - DNA, 69 bp, synthetic construct
  misc_feature 1..69: note = Description of Artificial Sequence: Viral Signal Sequenc
  source 1..69: mol_type = other DNA
atgctgagctttgtggatacccgcaccctgctgctgctggcggtgaccagctgcctggcgacctgccag

SEQ ID NO: 47 - DNA, 96 bp, synthetic construct
  misc_feature 1..96: note = Description of Artificial Sequence: Viral Signal Sequence
  source 1..96: mol_type = other DNA
atgggcagcagccaggcgccgcgcatgggcagcgtgggcggccatggcctgatggcgctgctgatggcgggcctgattctgccgggcattctggcg

SEQ ID NO: 48 - DNA, 51 bp, synthetic construct
  misc_feature 1..51: note = Description of Artificial Sequence: Viral Signal Sequence
  source 1..51: mol_type = other DNA
atggcgggcattttttattttctgtttagctttctgtttggcatttgcgat

SEQ ID NO: 49 - DNA, 66 bp, synthetic construct
  misc_feature 1..66: note = Description of Artificial Sequence: Viral Signal Sequence
  source 1..66: mol_type = other DNA
atggaaaaccgcctgctgcgcgtgtttctggtgtgggcggcgctgaccatggatggcgcgagcgcg

SEQ ID NO: 50 - DNA, 81 bp, synthetic construct
  misc_feature 1..81: note = Description of Artificial Sequence: Viral Signal Sequence
  source 1..81: mol_type = other DNA
atggcgcgccagggctgctttggcagctatcaggtgattagcctgtttacctttgcgattggcgtgaacctgtgcctgggc

SEQ ID NO: 51 - DNA, 57 bp, synthetic construct
  misc_feature 1..57: note = Description of Artificial Sequence: Bacterial Signal Sequence
  source 1..57: mol_type = other DNA
atgagccgcctgccggtgctgctgctgctgcagctgctggtgcgcccgggcctgcag

SEQ ID NO: 52 - DNA, 87 bp, synthetic construct
  misc_feature 1..87: note = Description of Artificial Sequence: Bacterial Signal Sequence
  source 1..87: mol_type = other DNA
atgaaacagcagaaacgcctgtatgcgcgcctgctgaccctgctgtttgcgctgatttttctgctgccgcatagcagcgcgagcgcg

SEQ ID NO: 53 - DNA, 78 bp, Homo sapiens
  source 1..78: mol_type = genomic DNA
atggcgacgccgctgcctccgccctccccgcggcacctgcggctgctgcggctgctgctctccgccctcgtcctcggc

SEQ ID NO: 54 - DNA, 54 bp, Homo sapiens
  source 1..54: mol_type = genomic DNA
atgaaggctccgggtcggctcgtgctcatcatcctgtgctccgtggtcttctct

SEQ ID NO: 55 - DNA, 45 bp, Homo sapiens
  source 1..45: mol_type = genomic DNA
atgcttcagctttggaaacttgttctcctgtgcggcgtgctcact

SEQ ID NO: 56 - DNA, 39 bp, Homo sapiens
  source 1..39: mol_type = genomic DNA
atgctttatctccagggttggagcatgcctgctgtggca

SEQ ID NO: 57 - DNA, 144 bp, Homo sapiens
  source 1..144: mol_type = genomic DNA
atggataacgtgcagccgaaaataaaacatcgccccttctgcttcagtgtgaaaggccacgtgaagatgctgcggctggatattatcaactcactggtaacaacagtattcatgctcatcgtatctgtgttggcactgatacca

SEQ ID NO: 58 - DNA, 96 bp, Homo sapiens
  source 1..96: mol_type = genomic DNA
atgccctgcctagaccaacagctcactgttcatgccctaccctgccctgcccagccctcctctctggccttctgccaagtggggttcttaacagca

SEQ ID NO: 59 - DNA, 138 bp, Homo sapiens
  source 1..138: mol_type = genomic DNA
atgaaaaccttgttcaatccagcccctgccattgctgacctggatccccagttctacaccctctcagatgtgttctgctgcaatgaaagtgaggctgagattttaactggcctcacggtgggcagcgctgcagatgct

SEQ ID NO: 60 - DNA, 57 bp, Homo sapiens
  source 1..57: mol_type = genomic DNA
atgaagcctctccttgttgtgtttgtctttcttttcctttgggatccagtgctggca

SEQ ID NO: 61 - DNA, 63 bp, Homo sapiens
  source 1..63: mol_type = genomic DNA
atgtcctgttccctaaagtttactttgattgtaatttttttttactgttggctttcatccagc

SEQ ID NO: 62 - DNA, 210 bp, Homo sapiens
  source 1..210: mol_type = genomic DNA
atggttcttactaaacctcttcaaagaaatggcagcatgatgagctttgaaaatgtgaaagaaaagagcagagaaggagggccccatgcacacacacccgaagaagaattgtgtttcgtggtaacacactaccctcaggttcagaccacactcaacctgtttttccatatattcaaggttcttactcaaccactttcccttctgtggggt

SEQ ID NO: 63 - DNA, 96 bp, Homo sapiens
  source 1..96: mol_type = genomic DNA
atggccaccccgccattccggctgataaggaagatgttttccttcaaggtgagcagatggatggggcttgcctgcttccggtccctggcggcatcc

SEQ ID NO: 64 - DNA, 87 bp, Homo sapiens
  source 1..87: mol_type = genomic DNA
atgagctttttccaactcctgatgaaaaggaaggaactcattcccttggtggtgttcatgactgtggcggcgggtggagcctcatct

SEQ ID NO: 65 - DNA, 123 bp, Homo sapiens
  source 1..123: mol_type = genomic DNA
atggtctcagctctgcggggagcacccctgatcagggtgcactcaagccctgtttcttctccttctgtgagtggaccacggaggctggtgagctgcctgtcatcccaaagctcagctctgagc

SEQ ID NO: 66 - DNA, 60 bp, Homo sapiens
  source 1..60: mol_type = genomic DNA
atgatggggtccccagtgagtcatctgctggccggcttctgtgtgtgggtcgtcttgggc

SEQ ID NO: 67 - DNA, 69 bp, Homo sapiens
  source 1..69: mol_type = genomic DNA
atggcaagcatggctgccgtgctcacctgggctctggctcttctttcagcgttttcggccacccaggca

SEQ ID NO: 68 - DNA, 135 bp, Homo sapiens
  source 1..135: mol_type = genomic DNA
atggtgctcatgtggaccagtggtgacgccttcaagacggcctacttcctgctgaagggtgcccctctgcagttctccgtgtgcggcctgctgcaggtgctggtggacctggccatcctggggcaggcctacgcc

SEQ ID NO: 69 - DNA, 204 bp, Homo sapiens
  source 1..204: mol_type = genomic DNA
atggattttgtcgctggagccatcggaggcgtctgcggtgttgctgtgggctaccccctggacacggtgaaggtcaggatccagacggagccaaagtacacaggcatctggcactgcgtccgggatacgtatcaccgagagcgcgtgtggggcttctaccggggcctctcgctgcccgtgtgcacggtgtccctggtatcttcc

SEQ ID NO: 70 - DNA, 147 bp, Homo sapiens
  source 1..147: mol_type = genomic DNA
atggagaagcccctcttcccattagtgcctttgcattggtttggctttggctacacagcactggttgtttctggtgggatcgttggctatgtaaaaacaggcagcgtgccgtccctggctgcagggctgctcttcggcagtctagcc

SEQ ID NO: 71 - DNA, 45 bp, Homo sapiens
  source 1..45: mol_type = genomic DNA
atgggtctgctccttcccctggcactctgcatcctagtcctgtgc

SEQ ID NO: 72 - DNA, 78 bp, Homo sapiens
  source 1..78: mol_type = genomic DNA
atggggatccagacgagccccgtcctgctggcctccctgggggtggggctggtcactctgctcggcctggctgtgggc

SEQ ID NO: 73 - DNA, 75 bp, Homo sapiens
  source 1..75: mol_type = genomic DNA
atgtcggacctgctactactgggcctgattgggggcctgactctcttactgctgctgacgctgctagcctttgcc

SEQ ID NO: 74 - DNA, 87 bp, Homo sapiens
  source 1..87: mol_type = genomic DNA
atggagactgtggtgattgttgccataggtgtgctggccaccatgtttctggcttcgtttgcagccttggtgctggtttgcaggcag

SEQ ID NO: 75 - DNA, 105 bp, Homo sapiens
  source 1..105: mol_type = genomic DNA
atgcgcggctctgtggagtgcacctggggttgggggcactgtgcccccagccccctgctcctttggactctacttctgtttgcagccccatttggcctgctgggg

SEQ ID NO: 76 - DNA, 171 bp, Homo sapiens
  source 1..171: mol_type = genomic DNA
atgatgccgtcccgtaccaacctggctactggaatccccagtagtaaagtgaaatattcaaggctctccagcacagacgatggctacattgaccttcagtttaagaaaacccctcctaagatcccttataaggccatcgcacttgccactgtgctgtttttgattggcgcc

SEQ ID NO: 77 - DNA, 108 bp, Homo sapiens
  source 1..108: mol_type = genomic DNA
atggccctgccccagatgtgtgacgggagccacttggcctccaccctccgctattgcatgacagtcagcggcacagtggttctggtggccgggacgctctgcttcgct

SEQ ID NO: 78 - DNA, 63 bp, synthetic construct
  misc_feature 1..63: note = Description of Artificial Sequence: Bacterial Signal Sequence
  source 1..63: mol_type = other DNA
tgaaaaagtggttcgttgctgccggcatcggcgctgccggactcatgctctccagcgccgcca

SEQ ID NO: 79 - DNA, 63 bp, synthetic construct
  misc_feature 1..63: note = Description of Artificial Sequence: Bacterial Signal Sequence
  source 1..63: mol_type = other DNA
atgaaacagagcaccattgcgctggcgctgctgccgctgctgtttaccccggtgaccaaagcg

SEQ ID NO: 80 - DNA, 63 bp, synthetic construct
  misc_feature 1..63: note = Description of Artificial Sequence: Bacterial Signal Sequence
  source 1..63: mol_type = other DNA
atgaaaaaaaccgcgattgcgattgcggtggcgctggcgggctttgcgaccgtggcgcaggcg

SEQ ID NO: 81 - DNA, 63 bp, synthetic construct
  misc_feature 1..63: note = Description of Artificial Sequence: Bacterial Signal Sequence
  source 1..63: mol_type = other DNA
atgaaaaaactgatgctggcgattttttttagcgtgctgagctttccgagctttagccagagc

SEQ ID NO: 82 - DNA, 69 bp, synthetic construct
  misc_feature 1..69: note = Description of Artificial Sequence: Bacterial Signal Sequence
  source 1..69: mol_type = other DNA
atgaaaaaaaacattgcgtttctgctggcgagcatgtttgtgtttagcattgcgaccaacgcgtatgcg

SEQ ID NO: 83 - DNA, 96 bp, Homo sapiens
  source 1..96: mol_type = genomic DNA
atgtttgcgaaacgctttaaaaccagcctgctgccgctgtttgcgggctttctgctgctgtttcatctggtgctggcgggcccggcggcggcgagc

SEQ ID NO: 84 - DNA, 57 bp, Homo sapiens
  source 1..57: mol_type = genomic DNA
atgcgctttccgagcatttttaccgcggtgctgtttgcggcgagcagcgcgctggcg

SEQ ID NO: 85 - DNA, 57 bp, Homo sapiens
  source 1..57: mol_type = genomic DNA
atgcgctttccgagcatttttaccaccgtgctgtttgcggcgagcagcgcgctggcg

SEQ ID NO: 86 - DNA, 57 bp, Homo sapiens
  source 1..57: mol_type = genomic DNA
atgcgctttccgagcatttttaccagcgtgctgtttgcggcgagcagcgcgctggcg

SEQ ID NO: 87 - DNA, 57 bp, Homo sapiens
  source 1..57: mol_type = genomic DNA
atgcgctttccgagcatttttacccatgtgctgtttgcggcgagcagcgcgctggcg

SEQ ID NO: 88 - DNA, 57 bp, Homo sapiens
  source 1..57: mol_type = genomic DNA
atgcgctttccgagcatttttaccattgtgctgtttgcggcgagcagcgcgctggcg

SEQ ID NO: 89 - DNA, 57 bp, Homo sapiens
  source 1..57: mol_type = genomic DNA
atgcgctttccgagcatttttacctttgtgctgtttgcggcgagcagcgcgctggcg

SEQ ID NO: 90 - DNA, 57 bp, Homo sapiens
  source 1..57: mol_type = genomic DNA
atgcgctttccgagcatttttaccgaagtgctgtttgcggcgagcagcgcgctggcg

SEQ ID NO: 91 - DNA, 57 bp, Homo sapiens
  source 1..57: mol_type = genomic DNA
atgcgctttccgagcatttttaccggcgtgctgtttgcggcgagcagcgcgctggcg

SEQ ID NO: 92 - DNA, 63 bp, Homo sapiens
  source 1..63: mol_type = genomic DNA
atgcgttcctcccccctcctccgctccgccgttgtggccgccctgccggtgttggcccttgcc

SEQ ID NO: 93 - DNA, 66 bp, Homo sapiens
  source 1..66: mol_type = genomic DNA
atgggcgcggcggccgtgcgctggcacttgtgcgtgctgctggccctgggcacacgcgggcggctg

SEQ ID NO: 94 - DNA, 53 bp, synthetic construct
  misc_feature 1..53: note = Description of Artificial Sequence: Signal Sequence
  source 1..53: mol_type = other DNA
atgaggagctcccttgtgctgttctttgtctctgcgtggacggccttggccag

SEQ ID NO: 95 - DNA, 96 bp, Homo sapiens
  source 1..96: mol_type = genomic DNA
atgctcaggggtccgggacccgggcggctgctgctgctagcagtcctgtgcctggggacatcggtgcgctgcaccgaaaccgggaagagcaagagg

SEQ ID NO: 96 - DNA, 69 bp, Homo sapiens
  source 1..69: mol_type = genomic DNA
atgcttaggggtccggggcccgggctgctgctgctggccgtccagctggggacagcggtgccctccacg

SEQ ID NO: 97 - DNA, 93 bp, Homo sapiens
  source 1..93: mol_type = genomic DNA
atgcgccggggggccctgaccgggctgctcctggtcctgtgcctgagtgttgtgctacgtgcagccccctctgcaacaagcaagaagcgcagg

SEQ ID NO: 98 - protein, 24 aa, Homo sapiens
MMPSSVSWGILLAGLCCLVPVSLA

SEQ ID NO: 99 - protein, 30 aa, Homo sapiens
MAGPATQSPMKLMALQLLLWHSALWTVQEA

SEQ ID NO: 100 - protein, 46 aa, Homo sapiens
MQRVNMIMAESPSLITICLLGYLLSAECTVFLDHENANKILNRPKR

SEQ ID NO: 101 - protein, 21 aa, Homo sapiens
MKGSLLLLLVSNLLLCQSVAP

SEQ ID NO: 102 - protein, 24 aa, Homo sapiens
MKWVTFISLLFLFSSAYSRGVFRR

SEQ ID NO: 103 - protein, 19 aa, Homo sapiens
MWWRLWWLLLLLLLLPMWA

SEQ ID NO: 104 - protein, 32 aa, Homo sapiens
MLFNLRILLNNAAFRNGHNFMVRNFRCGQPLQ

SEQ ID NO: 105 - protein, 29 aa, Homo sapiens
MSVLTPLLLRGLTGSARRLPVPRAKIHSL

SEQ ID NO: 106 - protein, 29 aa, Homo sapiens
MSVLTPLLLRGLTGSARRLPVPRAKIHSL

SEQ ID NO: 107 - protein, 59 aa, synthetic construct
  REGION 1..59: note = Description of Artificial Sequence: Bacterial Signal Sequence
VTKITLSPQNFRIQKQETTLLKEKSTEKNSLAKSILAVKNHFIELRSKLSERFISHKNT

SEQ ID NO: 108 - protein, 23 aa, synthetic construct
  REGION 1..23: note = Description of Artificial Sequence: Viral Signal Sequence
MLSFVDTRTLLLLAVTSCLATCQ

SEQ ID NO: 109 - protein, 32 aa, synthetic construct
  REGION 1..32: note = Description of Artificial Sequence: Viral Signal Sequence
MGSSQAPRMGSVGGHGLMALLMAGLILPGILA

SEQ ID NO: 110 - protein, 17 aa, synthetic construct
  REGION 1..17: note = Description of Artificial Sequence: Viral Signal Sequence
MAGIFYFLFSFLFGICD

SEQ ID NO: 111 - protein, 22 aa, synthetic construct
  REGION 1..22: note = Description of Artificial Sequence: Viral Signal Sequence
MENRLLRVFLVWAALTMDGASA

SEQ ID NO: 112 - protein, 27 aa, synthetic construct
  REGION 1..27: note = Description of Artificial Sequence: Viral Signal Sequence
MARQGCFGSYQVISLFTFAIGVNLCLG

SEQ ID NO: 113 - protein, 19 aa, synthetic construct
  REGION 1..19: note = Description of Artificial Sequence: Bacterial Signal Sequence
MSRLPVLLLLQLLVRPGLQ

SEQ ID NO: 114 - protein, 29 aa, synthetic construct
  REGION 1..29: note = Description of Artificial Sequence: Bacterial Signal Sequence
MKQQKRLYARLLTLLFALIFLLPHSSASA

SEQ ID NO: 115 - protein, 22 aa, Homo sapiens
MATPLPPPSPRHLRLLRLLLSG

SEQ ID NO: 116 - protein, 18 aa, Homo sapiens
MKAPGRLVLIILCSVVFS

SEQ ID NO: 117 - protein, 13 aa, Homo sapiens
MLQLWKLLCGVLT

SEQ ID NO: 118 - protein, 13 aa, Homo sapiens
MLYLQGWSMPAVA

SEQ ID NO: 119 - protein, 48 aa, Homo sapiens
MDNVQPKIKHRPFCFSVKGHVKMLRLDIINSLVTTVFMLIVSVLALIP

SEQ ID NO: 120 - protein, 32 aa, Homo sapiens
MPCLDQQLTVHALPCPAQPSSLAFCQVGFLTA

SEQ ID NO: 121 - protein, 46 aa, Homo sapiens
MKTLFNPAPAIADLDPQFYTLSDVFCCNESEAEILTGLTVGSAADA

SEQ ID NO: 122 - protein, 19 aa, Homo sapiens
MKPLLVVFVFLFLWDPVLA

SEQ ID NO: 123 - protein, 21 aa, Homo sapiens [sequence omitted]

SEQ ID NO: 124 - protein, 70 aa, Homo sapiens
MVLTKPLQRNGSMMSFENVKEKSREGGPHAHTPEEELCFVVTHTPQVQTTLNLFFHIFKVLTQPLSLLWG

SEQ ID NO: 125 - protein, 32 aa, Homo sapiens
MATPPFRLIRKMFSFKVSRWMGLACFRSLAAS

SEQ ID NO: 126 - protein, 29 aa, Homo sapiens
MSFFQLLMKRKELIPLVVFMTVAAGGASS

SEQ ID NO: 127 - protein, 41 aa, Homo sapiens
MVSALRGAPLIRVHSSPVSSPSVSGPAALVSCLSSQSSALS

SEQ ID NO: 128 - protein, 20 aa, Homo sapiens
MMGSPVSHLLAGFCVWVVLG

SEQ ID NO: 129 - protein, 23 aa, Homo sapiens
MASMAAVLTWALALLSAFSATQA

SEQ ID NO: 130 - protein, 45 aa, Homo sapiens
MVLMWTSGDAFKTAYFLLKGAPLQFSVCGLLQVLVDLAILGQATA

SEQ ID NO: 131 - protein, 68 aa, Homo sapiens
MDFVAGAIGGVCGVAVGYPLDTVKVRIQTEPLYTGIWHCVRDTYHRERVWGFYRGLSLPVCTVSLVSS

SEQ ID NO: 132 - protein, 49 aa, Homo sapiens
MEKPLFPLVPLHWFGFGYTALVVSGGIVGYVKTGSVPSLAAGLLFGSLA

SEQ ID NO: 133 - protein, 15 aa, Homo sapiens
MGLLLPLALCILVLC

SEQ ID NO: 134 - protein, 26 aa, Homo sapiens
MGIQTSPVLLASLGVGLVTLLGLAVG

SEQ ID NO: 135 - protein, 25 aa, Homo sapiens
MSDLLLLGLIGGLTLLLLLTLLAFA

SEQ ID NO: 136 - protein, 29 aa, Homo sapiens
METVVIVAIGVLATIFLASFAALVLVCRQ

SEQ ID NO: 137 - protein, 35 aa, Homo sapiens
MAGSVECTWGWGHCAPSPLLLWTLLLFAAPFGLLG

SEQ ID NO: 138 - protein, 57 aa, Homo sapiens
MMPSRTNLATGIPSSKVKYSRLSSTDDGYIDLQFKKTPPKIPYKAIALATVLFLIGA

SEQ ID NO: 139 - protein, 36 aa, Homo sapiens
MALPQMCDGSHLASTLRYCMTVSGTVVLVAGTLCFA

SEQ ID NO: 140 - protein, 21 aa, Homo sapiens
MKKWFVAAGIGAGLLMLSSAA

SEQ ID NO: 141 - protein, 21 aa, Homo sapiens
MKQSTIALALLPLLFTPVTKA

SEQ ID NO: 142 - protein, 21 aa, Homo sapiens
MKKTAIAIAVALAGFATVAQA

SEQ ID NO: 143 - protein, 21 aa, synthetic construct
  REGION 1..21: note = Description of Artificial Sequence: Bacterial Signal Sequence
MKKLMLAIFFSVLSFPSFSQS

SEQ ID NO: 144 - protein, 23 aa, synthetic construct
  REGION 1..23: note = Description of Artificial Sequence: Bacterial Signal Sequence
MKKNIAFLLASMFVFSIATNAYA

SEQ ID NO: 145 - protein, 32 aa, Homo sapiens
MFAKRFKTSLLPLFAGFLLLFHLVLAGPAAAS

SEQ ID NO: 146 - protein, 19 aa, Homo sapiens
MRFPSIFTAVLFAASSALA

SEQ ID NO: 147 - protein, 19 aa, Homo sapiens
MRFPSIFTTVLFAASSALA

SEQ ID NO: 148 - protein, 19 aa, Homo sapiens
MRFPSIFTSVLFAASSALA

SEQ ID NO: 149 - protein, 19 aa, Homo sapiens
MRFPSIFTHVLFAASSALA

SEQ ID NO: 150 - protein, 19 aa, Homo sapiens
MRFPSIFTIVLFAASSALA

SEQ ID NO: 151 - protein, 19 aa, Homo sapiens
MRFPSIFTFVLFAASSALA

SEQ ID NO: 152 - protein, 19 aa, Homo sapiens
MRFPSIFTEVLFAASSALA

SEQ ID NO: 153 - protein, 19 aa, Homo sapiens
MRFPSIFTGVLFAASSALA

SEQ ID NO: 154 - protein, 21 aa, Homo sapiens
MRSSPLLRSAVVAALPVLALA

SEQ ID NO: 155 - protein, 22 aa, Homo sapiens
MGAAAVRWHLCVLLALGTRGRL

SEQ ID NO: 156 - protein, 17 aa, synthetic construct
  REGION 1..17: note = Description of Artificial Sequence: Signal Sequence
MRSSLVLFFVSAWTALA

SEQ ID NO: 157 - protein, 32 aa, Homo sapiens
MLRGPGPGRLLLLAVLCLGTSVRCTETGKSKR

SEQ ID NO: 158 - protein, 26 aa, Homo sapiens
MLRGPGPGLLLLAVQCLGTAVPSTGA

SEQ ID NO: 159 - protein, 31 aa, Homo sapiens
MRRGALTGLLLVLCLSVVLRAAPSATSKKRR

SEQ ID NO: 160-163 - skipped (4 entries)

SEQ ID NO: 164 - protein, 6 aa, Homo sapiens
LVPRGS

SEQ ID NO: 165 - protein, 4 aa, Homo sapiens
LVPR

SEQ ID NO: 166 - skipped

SEQ ID NO: 167 - protein, 4 aa, Homo sapiens
IEGR

SEQ ID NO: 168 - protein, 4 aa, Homo sapiens
IDGR

SEQ ID NO: 169 - protein, 4 aa, Homo sapiens
AEGR

SEQ ID NO: 170 - skipped

SEQ ID NO: 171 - RNA, 22 nt, Homo sapiens
  source 1..22: mol_type = genomic RNA
ctgtacagcctcctagctttcc

SEQ ID NO: 172 - RNA, 21 nt, Homo sapiens
  source 1..21: mol_type = genomic RNA
ctatacaatctactgtctttc

SEQ ID NO: 173 - RNA, 22 nt, Homo sapiens
  source 1..22: mol_type = genomic RNA
tgaggtagtaggttgtatagtt

SEQ ID NO: 174 - RNA, 22 nt, Homo sapiens
  source 1..22: mol_type = genomic RNA
ctatacaacctactgccttccc

SEQ ID NO: 175 - RNA, 22 nt, Homo sapiens
  source 1..22: mol_type = genomic RNA
tgaggtagtaggttgtgtggtt

SEQ ID NO: 176 - RNA, 22 nt, Homo sapiens
  source 1..22: mol_type = genomic RNA
tgaggtagtaggttgtatggtt

SEQ ID NO: 177 - RNA, 22 nt, Homo sapiens
  source 1..22: mol_type = genomic RNA
ctatacgacctgctgcctttct

SEQ ID NO: 178 - RNA, 22 nt, Homo sapiens
  source 1..22: mol_type = genomic RNA
agaggtagtaggttgcatagtt

SEQ ID NO: 179 - RNA, 22 nt, Homo sapiens
  source 1..22: mol_type = genomic RNA
ctatacggcctcctagctttcc

SEQ ID NO: 180 - RNA, 22 nt, Homo sapiens
  source 1..22: mol_type = genomic RNA
tgaggtaggaggttgtatagtt

SEQ ID NO: 181 - RNA, 22 nt, Homo sapiens
  source 1..22: mol_type = genomic RNA
ctatacaatctattgccttccc

SEQ ID NO: 182 - RNA, 22 nt, Homo sapiens
  source 1..22: mol_type = genomic RNA
ctatacagtctactgtctttcc

SEQ ID NO: 183 - RNA, 22 nt, Homo sapiens
  source 1..22: mol_type = genomic RNA
tgaggtagtagattgtatagtt

SEQ ID NO: 184 - RNA, 21 nt, Homo sapiens
  source 1..21: mol_type = genomic RNA
ctgtacaggccactgccttgc

SEQ ID NO: 185 - RNA, 22 nt, Homo sapiens
  source 1..22: mol_type = genomic RNA
tgaggtagtagtttgtacagtt

SEQ ID NO: 186 - RNA, 22 nt, Homo sapiens
  source 1..22: mol_type = genomic RNA
ctgcgcaagctactgccttgct

SEQ ID NO: 187 - RNA, 22 nt, Homo sapiens
  source 1..22: mol_type = genomic RNA
tgaggtagtagtttgtgctgtt

SEQ ID NO: 188 - RNA, 22 nt, Homo sapiens
  source 1..22: mol_type = genomic RNA
tggaatgtaaagaagtatgtat

SEQ ID NO: 189 - RNA, 22 nt, Homo sapiens
  source 1..22: mol_type = genomic RNA
caagcttgtatctataggtatg

SEQ ID NO: 190 - RNA, 22 nt, Homo sapiens
  source 1..22: mol_type = genomic RNA
aacccgtagatccgaacttgtg

SEQ ID NO: 191 - RNA, 21 nt, Homo sapiens
  source 1..21: mol_type = genomic RNA
tacagtactgtgataactgaa

SEQ ID NO: 192 - RNA, 22 nt, Homo sapiens
  source 1..22: mol_type = genomic RNA
cagttatcacagtgctgatgct

SEQ ID NO: 193 - RNA, 23 nt, Homo sapiens
  source 1..23: mol_type = genomic RNA
agcttctttacagtgctgccttg

SEQ ID NO: 194 - RNA, 23 nt, Homo sapiens
  source 1..23: mol_type = genomic RNA
agcagcattgtacagggctatga

SEQ ID NO: 195 - RNA, 23 nt, Homo sapiens
  source 1..23: mol_type = genomic RNA
tcatagccctgtacaatgctgct

SEQ ID NO: 196 - RNA, 22 nt, Homo sapiens
  source 1..22: mol_type = genomic RNA
acggatgtttgagcatgtgcta

SEQ ID NO: 197 - RNA, 23 nt, Homo sapiens
  source 1..23: mol_type = genomic RNA
tcaaatgctcagactcctgtggt

SEQ ID NO: 198 - RNA, 22 nt, Homo sapiens
  source 1..22: mol_type = genomic RNA
ctgcaatgtaagcacttcttac

SEQ ID NO: 199 - RNA, 23 nt, Homo sapiens
  source 1..23: mol_type = genomic RNA
aaaagtgcttacagtgcaggtag

SEQ ID NO: 200 - RNA, 22 nt, Homo sapiens
  source 1..22: mol_type = genomic RNA
ccgcactgtgggtacttgctgc

SEQ ID NO: 201 - RNA, 21 nt, Homo sapiens
  source 1..21: mol_type = genomic RNA
taaagtgctgacagtgcagat

SEQ ID NO: 202 - RNA, 23 nt, Homo sapiens
  source 1..23: mol_type = genomic RNA
agcagcattgtacagggctatca

SEQ ID NO: 203 - RNA, 22 nt, Homo sapiens
  source 1..22: mol_type = genomic RNA
caaattcgtatctaggggaata

SEQ ID NO: 204 - RNA, 23 nt, Homo sapiens
  source 1..23: mol_type = genomic RNA
taccctgtagatccgaatttgtg

SEQ ID NO: 205 - RNA, 22 nt, Homo sapiens
  source 1..22: mol_type = genomic RNA
acagattcgattctaggggaat

SEQ ID NO: 206 - RNA, 23 nt, Homo sapiens
  source 1..23: mol_type = genomic RNA
taccctgtagaaccgaatttgtg

SEQ ID NO: 207 - RNA, 21 nt, Homo sapiens
  source 1..21: mol_type = genomic RNA
ttgctcactgttcttccctag

SEQ ID NO: 208 - RNA, 18 nt, Homo sapiens
  source 1..18: mol_type = genomic RNA
cagggtcagctgagcatg

SEQ ID NO: 209 - RNA, 21 nt, Homo sapiens
  source 1..21: mol_type = genomic RNA
aagcattctttcattggttgg

SEQ ID NO: 210 - RNA, 22 nt, Homo sapiens
  source 1..22: mol_type = genomic RNA
tttccggctcgcgtgggtgtgt

SEQ ID NO: 211 - RNA, 21 nt, Homo sapiens
  source 1..21: mol_type = genomic RNA
ccgtcgccgccacccgagccg

SEQ ID NO: 212 - RNA, 23 nt, Homo sapiens
  source 1..23: mol_type = genomic RNA
gagggtcttgggagggatgtgac

SEQ ID NO: 213 - RNA, 27 nt, Homo sapiens
  source 1..27: mol_type = genomic RNA
cactgtaggtgatggtgagagtgggca

SEQ ID NO: 214 - RNA, 23 nt, Homo sapiens
  source 1..23: mol_type = genomic RNA
cctgcagcgacttgatggcttcc

SEQ ID NO: 215 - RNA, 22 nt, Homo sapiens
  source 1..22: mol_type = genomic RNA
atatacagggggagactcttat

SEQ ID NO: 216 - RNA, 22 nt, Homo sapiens
  source 1..22: mol_type = genomic RNA
atatacagggggagactctcat

SEQ ID NO: 217 - RNA, 21 nt, Homo sapiens
  source 1..21: mol_type = genomic RNA
agaggataccctttgtatgtt

SEQ ID NO: 218 - RNA, 23 nt, Homo sapiens
  source 1..23: mol_type = genomic RNA
gggatggtagaccggtgacgtgc

SEQ ID NO: 219 - RNA, 21 nt, Homo sapiens
  source 1..21: mol_type = genomic RNA
taggacacatggtctacttct

SEQ ID NO: 220 - RNA, 22 nt, Homo sapiens
  source 1..22: mol_type = genomic RNA
ctcctgagccattctgagcctc

SEQ ID NO: 221 - RNA, 21 nt, Homo sapiens
  source 1..21: mol_type = genomic RNA
gtgccagctgcagtgggggag

SEQ ID NO: 222 - RNA, 21 nt, Homo sapiens
  source 1..21: mol_type = genomic RNA
cccggagccaggatgcagctc

SEQ ID NO: 223 - RNA, 21 nt, Homo sapiens
  source 1..21: mol_type = genomic RNA
tcgtggcctggtctccattat

SEQ ID NO: 224 - RNA, 20 nt, Homo sapiens
  source 1..20: mol_type = genomic RNA
tctgcagggtttgctttgag

SEQ ID NO: 225 - RNA, 21 nt, Homo sapiens
  source 1..21: mol_type = genomic RNA
tgttcatgtagatgtttaagc

SEQ ID NO: 226 - RNA, 18 nt, Homo sapiens
  source 1..18: mol_type = genomic RNA
tcagctggccctcatttc

SEQ ID NO: 227 - RNA, 21 nt, Homo sapiens
  source 1..21: mol_type = genomic RNA
tggcagggaggctgggagggg

SEQ ID NO: 228 - RNA, 20 nt, Homo sapiens
  source 1..20: mol_type = genomic RNA
tcactgttcagacaggcgga

SEQ ID NO: 229 - RNA, 22 nt, Homo sapiens
  source 1..22: mol_type = genomic RNA
aacgccattatcacactaaata

SEQ ID NO: 230 - RNA, 21 nt, Homo sapiens
  source 1..21: mol_type = genomic RNA
ccccacctcctctctcctcag

SEQ ID NO: 231 - RNA, 19 nt, Homo sapiens
  source 1..19: mol_type = genomic RNA
gtgaggactcgggaggtgg

SEQ ID NO: 232 - RNA, 22 nt, Homo sapiens
  source 1..22: mol_type = genomic RNA
tgagcccctgtgccgcccccag

SEQ ID NO: 233 - RNA, 22 nt, Homo sapiens
  source 1..22: mol_type = genomic RNA
gtgggtacggcccagtgggggg

SEQ ID NO: 234 - RNA, 22 nt, Homo sapiens
  source 1..22: mol_type = genomic RNA
tggagtgtgacaatggtgtttg

SEQ ID NO: 235 - RNA, 22 nt, Homo sapiens
  source 1..22: mol_type = genomic RNA
tcaccagccctgtgttccctag

SEQ ID NO: 236 - RNA, 26 nt, Homo sapiens
  source 1..26: mol_type = genomic RNA
gtgagggcatgcaggcctggatgggg

SEQ ID NO: 237 - RNA, 20 nt, Homo sapiens
  source 1..20: mol_type = genomic RNA
cgtgccacccttttccccag

SEQ ID NO: 238 - RNA, 17 nt, Homo sapiens
  source 1..17: mol_type = genomic RNA
gtggggccaggcggtgg

SEQ ID NO: 239 - RNA, 20 nt, Homo sapiens
  source 1..20: mol_type = genomic RNA
tcacacctgcctcgcccccc

SEQ ID NO: 240 - RNA, 21 nt, Homo sapiens
  source 1..21: mol_type = genomic RNA
gtgggcgggggcaggtgtgtg

SEQ ID NO: 241 - RNA, 23 nt, Homo sapiens
  source 1..23: mol_type = genomic RNA
ctctcaccactgccctcccacag

SEQ ID NO: 242 - RNA, 24 nt, Homo sapiens
  source 1..24: mol_type = genomic RNA
gtgggtagggtttgggggagagcg

SEQ ID NO: 243 - RNA, 20 nt, Homo sapiens
  source 1..20: mol_type = genomic RNA
gtgtctgggcggacagctgc

SEQ ID NO: 244 - RNA, 22 nt, Homo sapiens
  source 1..22: mol_type = genomic RNA
agtgggaggccagggcacggca

SEQ ID NO: 245 - RNA, 20 nt, Homo sapiens
  source 1..20: mol_type = genomic RNA
tgagccctgtcctcccgcag

SEQ ID NO: 246 - RNA, 22 nt, Homo sapiens
  source 1..22: mol_type = genomic RNA
tcggcctgaccacccaccccac

SEQ ID NO: 247 - RNA, 21 nt, Homo sapiens
  source 1..21: mol_type = genomic RNA
ggggggggggggggggggccg

SEQ ID NO: 248 - RNA, 22 nt, Homo sapiens
  source 1..22: mol_type = genomic RNA
cctcttccccttgtctctccag

SEQ ID NO: 249 - RNA, 22 nt, Homo sapiens
  source 1..22: mol_type = genomic RNA
tgagtgacaggggaaatgggga

SEQ ID NO: 250 - RNA, 21 nt, Homo sapiens
  source 1..21: mol_type = genomic RNA
tccttctgctccgtcccccag

SEQ ID NO: 251 - RNA, 21 nt, Homo sapiens
  source 1..21: mol_type = genomic RNA
cgggggcggggccgaagcgcg

SEQ ID NO: 252 - RNA, 20 nt, Homo sapiens
  source 1..20: mol_type = genomic RNA
cttcctcgtctgtctgcccc

SEQ ID NO: 253 - RNA, 23 nt, Homo sapiens
  source 1..23: mol_type = genomic RNA
gtgagtgggagccccagtgtgtg

SEQ ID NO: 254 - RNA, 22 nt, Homo sapiens
  source 1..22: mol_type = genomic RNA
aactggatcaattataggagtg

SEQ ID NO: 255 - RNA, 20 nt, Homo sapiens
  source 1..20: mol_type = genomic RNA
taaggcacgcggtgaatgcc

SEQ ID NO: 256 - RNA, 26 nt, Homo sapiens
  source 1..26: mol_type = genomic RNA
aagtagttggtttgtatgagatggtt

SEQ ID NO: 257 - RNA, 21 nt, Homo sapiens
  source 1..21: mol_type = genomic RNA
aagtgatctaaaggcctacat

SEQ ID NO: 258 - RNA, 22 nt, Homo sapiens
  source 1..22: mol_type = genomic RNA
tcagatgatctaaaggcctata

SEQ ID NO: 259 - RNA, 21 nt, Homo sapiens
  source 1..21: mol_type = genomic RNA
taggcctttagatcacttaaa

SEQ ID NO: 260 - RNA, 22 nt, Homo sapiens
  source 1..22: mol_type = genomic RNA
cgtgttcacagcggaccttgat

SEQ ID NO: 261 - RNA, 19 nt, Homo sapiens
  source 1..19: mol_type = genomic RNA
aatggatttttggagcagg

SEQ ID NO: 262 - RNA, 24 nt, Homo sapiens
  source 1..24: mol_type = genomic RNA
ccccgggaacgtcgagactggagc

SEQ ID NO: 263 - RNA, 22 nt, Homo sapiens
  source 1..22: mol_type = genomic RNA
acccgtcccgttcgtccccgga

SEQ ID NO: 264 - RNA, 27 nt, Homo sapiens
  source 1..27: mol_type = genomic RNA
accttcttgtataagcactgtgctaaa

SEQ ID NO: 265 - RNA, 22 nt, Homo sapiens
  source 1..22: mol_type = genomic RNA
acgcccttcccccccttcttca

SEQ ID NO: 266 - RNA, 21 nt, Homo sapiens
  source 1..21: mol_type = genomic RNA
acggtgctggatgtggccttt

SEQ ID NO: 267 - RNA, 21 nt, Homo sapiens
  source 1..21: mol_type = genomic RNA
actctagctgccaaaggcgct

SEQ ID NO: 268 - RNA, 22 nt, Homo sapiens
  source 1..22: mol_type = genomic RNA
agaaggaaattgaattcattta

SEQ ID NO: 269 - RNA, 21 nt, Homo sapiens
  source 1..21: mol_type = genomic RNA
agagaagaagatcagcctgca

SEQ ID NO: 270 - RNA, 24 nt, Homo sapiens
  source 1..24: mol_type = genomic RNA
agcctggaagctggagcctgcagt

SEQ ID NO: 271 - RNA, 23 nt, Homo sapiens
  source 1..23: mol_type = genomic RNA
aggatgagcaaagaaagtagatt

SEQ ID NO: 272 - RNA, 22 nt, Homo sapiens
  source 1..22: mol_type = genomic RNA
aaccactttctttgctcatcca

SEQ ID NO: 273 - RNA, 22 nt, Homo sapiens
  source 1..22: mol_type = genomic RNA
cggatgagcaaagaaagtggtt

SEQ ID NO: 274 - RNA, 22 nt, Homo sapiens
  source 1..22: mol_type = genomic RNA
aggcattgacttctcactagct

SEQ ID NO: 275 - RNA, 21 nt, Homo sapiens
  source 1..21: mol_type = genomic RNA
agtgaatgatgggttctgacc

SEQ ID NO: 276 - RNA, 21 nt, Homo sapiens
  source 1..21: mol_type = genomic RNA
agttaggattaggtcgtggaa

SEQ ID NO: 277 - RNA, 22 nt, Homo sapiens
  source 1..22: mol_type = genomic RNA
acaggtgaggttcttgggagcc

SEQ ID NO: 278 - RNA, 24 nt, Homo sapiens
  source 1..24: mol_type = genomic RNA
tccctgagaccctttaacctgtga

SEQ ID NO: 279 - RNA, 22 nt, Homo sapiens
  source 1..22: mol_type = genomic RNA
acgggttaggctcttgggagct

SEQ ID NO: 280 - RNA, 22 nt, Homo sapiens
  source 1..22: mol_type = genomic RNA
tcacaagtcaggctcttgggac

SEQ ID NO: 281 - RNA, 22 nt, Homo sapiens
  source 1..22: mol_type = genomic RNA
tccctgagaccctaacttgtga

SEQ ID NO: 282 - RNA, 18 nt, Homo sapiens
  source 1..18: mol_type = genomic RNA
atcccacctctgccacca

SEQ ID NO: 283 - RNA, 19 nt, Homo sapiens
  source 1..19: mol_type = genomic RNA
atcccaccactgccaccat

SEQ ID NO: 284 - RNA, 19 nt, Homo sapiens
  source 1..19: mol_type = genomic RNA
atggataaggctttggctt

SEQ ID NO: 285 - RNA, 22 nt, Homo sapiens
  source 1..22: mol_type = genomic RNA
atgggtgaatttgtagaaggat

SEQ ID NO: 286 - RNA, 22 nt, Homo sapiens
  source 1..22: mol_type = genomic RNA
atggtaccctggcatactgagt

SEQ ID NO: 287 - RNA, 22 nt, Homo sapiens
  source 1..22: mol_type = genomic RNA
tcgtaccgtgagtaataatgcg

SEQ ID NO: 288 - RNA, 23 nt, Homo sapiens
  source 1..23: mol_type = genomic RNA
caagtcttatttgagcacctgtt

SEQ ID NO: 289 - RNA, 22 nt, Homo sapiens
  source 1..22: mol_type = genomic RNA
caggatgtggtcaagtgttgtt

SEQ ID NO: 290 - RNA, 21 nt, Homo sapiens
  source 1..21: mol_type = genomic RNA
cattattacttttggtacgcg

SEQ ID NO: 291 - RNA, 23 nt, Homo sapiens
  source 1..23: mol_type = genomic RNA
cctcagggctgtagaacagggct

SEQ ID NO: 292 - RNA, 21 nt, Homo sapiens
  source 1..21: mol_type = genomic RNA
cctgttgaagtgtaatcccca

SEQ ID NO: 293 - RNA, 18 nt, Homo sapiens
  source 1..18: mol_type = genomic RNA
cgggcgtggtggtggggg

SEQ ID NO: 294 - RNA, 20 nt, Homo sapiens
  source 1..20: mol_type = genomic RNA
cgggcgtggtggtgggggtg

SEQ ID NO: 295 - RNA, 22 nt, Homo sapiens
  source 1..22: mol_type = genomic RNA
ctggactgagccgtgctactgg

SEQ ID NO: 296 - RNA, 22 nt, Homo sapiens
  source 1..22: mol_type = genomic RNA
ctggactgagccatgctactgg

SEQ ID NO: 297 - RNA, 23 nt, Homo sapiens
  source 1..23: mol_type = genomic RNA
ctggagatatggaagagctgtgt

SEQ ID NO: 298 - RNA, 22 nt, Homo sapiens
  source 1..22: mol_type = genomic RNA
agtgcctgctatgtgccaggca

SEQ ID NO: 299 - RNA, 22 nt, Homo sapiens
  source 1..22: mol_type = genomic RNA
cttggcacctagcaagcactca

SEQ ID NO: 300 - RNA, 26 nt, Homo sapiens
  source 1..26: mol_type = genomic RNA
gatgatgatggcagcaaattctgaaa

SEQ ID NO: 301 - RNA, 25 nt, Homo sapiens
  source 1..25: mol_type = genomic RNA
gggcgacaaagcaagactctttctt

SEQ ID NO: 302 - RNA, 22 nt, Homo sapiens
  source 1..22: mol_type = genomic RNA
ggcgacaaaacgagaccctgtc

SEQ ID NO: 303 - RNA, 25 nt, Homo sapiens
  source 1..25: mol_type = genomic RNA
gaacccatgaggttgaggctgcagt

SEQ ID NO: 304 - RNA, 22 nt, Homo sapiens
  source 1..22: mol_type = genomic RNA
ttgcttgaacccaggaagtgga

SEQ ID NO: 305 - RNA, 19 nt, Homo sapiens
  source 1..19: mol_type = genomic RNA
ggagatggaggttgcagtg

SEQ ID NO: 306 - RNA, 21 nt, Homo sapiens
  source 1..21: mol_type = genomic RNA
accactgcactccagcctgag

SEQ ID NO: 307 - RNA, 22 nt, Homo sapiens
  source 1..22: mol_type = genomic RNA
ggtggttgaggctgcagtaagt

SEQ ID NO: 308 - RNA, 22 nt, Homo sapiens
  source 1..22: mol_type = genomic RNA
tcggatccgtctgagcttggct

SEQ ID NO: 309 - RNA, 17 nt, Homo sapiens
  source 1..17: mol_type = genomic RNA
gtgggggagaggctgtc

SEQ ID NO: 310 - RNA, 22 nt, Homo sapiens
  source 1..22: mol_type = genomic RNA
ctgaagctcagagggctctgat

SEQ ID NO: 311 - RNA, 20 nt, Homo sapiens
  source 1..20: mol_type = genomic RNA
taaagagccctgtggagaca

SEQ ID NO: 312 - RNA, 22 nt, Homo sapiens
  source 1..22: mol_type = genomic RNA
tacgtagatatatatgtatttt

SEQ ID NO: 313 - RNA, 24 nt, Homo sapiens
  source 1..24: mol_type = genomic RNA
aaatatatatatatatgtacgtat

SEQ ID NO: 314 - RNA, 22 nt, Homo sapiens
  source 1..22: mol_type = genomic RNA
tagtactgtgcatatcatctat

SEQ ID NO: 315 - RNA, 17 nt, Homo sapiens
  source 1..17: mol_type = genomic RNA
tcatattgcttctttct

SEQ ID NO: 316 - RNA, 21 nt, Homo sapiens
  source 1..21: mol_type = genomic RNA
tcacagtgaaccggtctcttt

SEQ ID NO: 317 - RNA, 17 nt, Homo sapiens
  source 1..17: mol_type = genomic RNA
tcgcctcctcctctccc

SEQ ID NO: 318 - RNA, 20 nt, Homo sapiens
  source 1..20: mol_type = genomic RNA
tcgtttgcctttttctgctt

SEQ ID NO: 319 - RNA, 22 nt, Homo sapiens
  source 1..22: mol_type = genomic RNA
tctacaaaggaaagcgctttct

SEQ ID NO: 320 - RNA, 22 nt, Homo sapiens
  source 1..22: mol_type = genomic RNA
tctatacagaccctggcttttc

SEQ ID NO: 321 - RNA, 22 nt, Homo sapiens
  source 1..22: mol_type = genomic RNA
tctgggcaacaaagtgagacct

SEQ ID NO: 322 - RNA, 21 nt, Homo sapiens
  source 1..21: mol_type = genomic RNA
gatctcactttgttgcccagg

SEQ ID NO: 323 - RNA, 21 nt, Homo sapiens
  source 1..21: mol_type = genomic RNA
tgcaggaccaagatgagccct

SEQ ID NO: 324 - RNA, 22 nt, Homo sapiens
  source 1..22: mol_type = genomic RNA
tgctggatcagtggttcgagtc

SEQ ID NO: 325 - RNA, 21 nt, Homo sapiens
  source 1..21: mol_type = genomic RNA
tggactgccctgatctggaga

SEQ ID NO: 326 - RNA, 23 nt, Homo sapiens
  source 1..23: mol_type = genomic RNA
tggagtccaggaatctgcatttt

SEQ ID NO: 327 - RNA, 19 nt, Homo sapiens
  source 1..19: mol_type = genomic RNA
tggatttttggatcaggga

SEQ ID NO: 328 - RNA, 24 nt, Homo sapiens
  source 1..24: mol_type = genomic RNA
tggccctgactgaagaccagcagt

SEQ ID NO: 329 - RNA, 22 nt, Homo sapiens
  source 1..22: mol_type = genomic RNA
aagcccttaccccaaaaagtat

SEQ ID NO: 330 - RNA, 20 nt, Homo sapiens
  source 1..20: mol_type = genomic RNA
tcgcgccccggctcccgttc

SEQ ID NO: 331 - RNA, 22 nt, Homo sapiens
  source 1..22: mol_type = genomic RNA
aagcccttaccccaaaaagcat

SEQ ID NO: 332 - RNA, 25 nt, Homo sapiens
  source 1..25: mol_type = genomic RNA
tgggaacgggttccggcagacgctg

SEQ ID NO: 333 - RNA, 22 nt, Homo sapiens
  source 1..22: mol_type = genomic RNA
tgggtggtctggagatttgtgc

SEQ ID NO: 334 - RNA, 22 nt, Homo sapiens
  source 1..22: mol_type = genomic RNA
tgtgaggttggcattgttgtct

SEQ ID NO: 335 - RNA, 21 nt, Homo sapiens
  source 1..21: mol_type = genomic RNA
ttaggccgcagatctgggtga

SEQ ID NO: 336 - RNA, 22 nt, Homo sapiens
  source 1..22: mol_type = genomic RNA
aataggccacggatctgggcaa

SEQ ID NO: 337 - RNA, 21 nt, Homo sapiens
  source 1..21: mol_type = genomic RNA
cacccagatctgcggcctaat

SEQ ID NO: 338 - RNA, 21 nt, Homo sapiens
  source 1..21: mol_type = genomic RNA
ctttttgcggtctgggcttgc

SEQ ID NO: 339 - RNA, 22 nt, Homo sapiens
  source 1..22: mol_type = genomic RNA
ttagggccctggctccatctcc

SEQ ID NO: 340 - RNA, 17 nt, Homo sapiens
  source 1..17: mol_type = genomic RNA
ttcaagtaattcaggtg

SEQ ID NO: 341 - RNA, 22 nt, Homo sapiens
  source 1..22: mol_type = genomic RNA
ttcattcggctgtccagatgta

SEQ ID NO: 342 - RNA, 22 nt, Homo sapiens
  source 1..22: mol_type = genomic RNA
ttctggaattctgtgtgaggga

SEQ ID NO: 343 - RNA, 24 nt, Homo sapiens
  source 1..24: mol_type = genomic RNA
ttgcagctgcctgggagtgacttc

SEQ ID NO: 344 - RNA, 21 nt, Homo sapiens
  source 1..21: mol_type = genomic RNA
ttgggacatacttatgctaaa

SEQ ID NO: 345 - RNA, 22 nt, Homo sapiens
  source 1..22: mol_type = genomic RNA
tttagagacggggtcttgctct

SEQ ID NO: 346 - RNA, 22 nt, Homo sapiens
  source 1..22: mol_type = genomic RNA
tctcactgtagcctcgaacccc

SEQ ID NO: 347 - RNA, 22 nt, Homo sapiens
  source 1..22: mol_type = genomic RNA
tttgaggctacagtgagatgtg

SEQ ID NO: 348 - RNA, 22 nt, Homo sapiens
  source 1..22: mol_type = genomic RNA
ttttcaactctaatgggagaga

SEQ ID NO: 349 - RNA, 18 nt, Homo sapiens
  source 1..18: mol_type = genomic RNA
acgttggctctggtggtg

SEQ ID NO: 350 - RNA, 22 nt, Homo sapiens
  source 1..22: mol_type = genomic RNA
ccacctcccctgcaaacgtcca

SEQ ID NO: 351 - RNA, 22 nt, Homo sapiens
  source 1..22: mol_type = genomic RNA
actcggcgtggcgtcggtcgtg

SEQ ID NO: 352 - RNA, 21 nt, Homo sapiens
  source 1..21: mol_type = genomic RNA
tcgaccggacctcgaccggct

SEQ ID NO: 353 - RNA, 22 nt, Homo sapiens
  source 1..22: mol_type = genomic RNA
cagtgcaatgttaaaagggcat

SEQ ID NO: 354 - RNA, 22 nt, Homo sapiens
  source 1..22: mol_type = genomic RNA
ttcacattgtgctactgtctgc

SEQ ID NO: 355 - RNA, 22 nt, Homo sapiens
  source 1..22: mol_type = genomic RNA
cagtgcaatgatgaaagggcat

SEQ ID NO: 356 - RNA, 21 nt, Homo sapiens
  source 1..21: mol_type = genomic RNA
actctttccctgttgcactac

SEQ ID NO: 357 - RNA, 18 nt, Homo sapiens
  source 1..18: mol_type = genomic RNA
cagggaggtgaatgtgat

SEQ ID NO: 358 - RNA, 19 nt, Homo sapiens
  source 1..19: mol_type = genomic RNA
gatgatgctgctgatgctg

SEQ ID NO: 359 - RNA, 22 nt, Homo sapiens
  source 1..22: mol_type = genomic RNA
tcaaaactgaggggcattttct

SEQ ID NO: 360 - RNA, 22 nt, Homo sapiens
  source 1..22: mol_type = genomic RNA
taacagtctacagccatggtcg

SEQ ID NO: 361 - RNA, 24 nt, Homo sapiens
  source 1..24: mol_type = genomic RNA
ccagacagaattctatgcactttc

SEQ ID NO: 362 - RNA, 22 nt, Homo sapiens
  source 1..22: mol_type = genomic RNA
accgtggctttcgattgttact

SEQ ID NO: 363 - RNA, 22 nt, Homo sapiens
  source 1..22: mol_type = genomic RNA
tttggtccccttcaaccagctg

SEQ ID NO: 364 - RNA, 22 nt, Homo sapiens
  source 1..22: mol_type = genomic RNA
tttggtccccttcaaccagcta

SEQ ID NO: 365 - RNA, 22 nt, Homo sapiens
  source 1..22: mol_type = genomic RNA
tgtgactggttgaccagagggg

SEQ ID NO: 366 - RNA, 22 nt, Homo sapiens
  source 1..22: mol_type = genomic RNA
ctcctggggcccgcactctcgc

SEQ ID NO: 367 - RNA, 22 nt, Homo sapiens
  source 1..22: mol_type = genomic RNA
tatagggattggagccgtggcg

SEQ ID NO: 368 - RNA, 23 nt, Homo sapiens
  source 1..23: mol_type = genomic RNA
tatggctttttattcctatgtga

SEQ ID NO: 369 - RNA, 22 nt, Homo sapiens
  source 1..22: mol_type = genomic RNA
atgtagggctaaaagccatggg

SEQ ID NO: 370 - RNA, 23 nt, Homo sapiens
  source 1..23: mol_type = genomic RNA
tatggcttttcattcctatgtga

SEQ ID NO: 371 - RNA, 22 nt, Homo sapiens
  source 1..22: mol_type = genomic RNA
catcatcgtctcaaatgagtct

SEQ ID NO: 372 - RNA, 23 nt, Homo sapiens
  source 1..23: mol_type = genomic RNA
actccatttgttttgatgatgga

SEQ ID NO: 373 - RNA, 23 nt, Homo sapiens
  source 1..23: mol_type = genomic RNA
ttattgcttaagaatacgcgtag

SEQ ID NO: 374 - RNA, 22 nt, Homo sapiens
  source 1..22: mol_type = genomic RNA
gctacttcacaacaccagggcc

SEQ ID NO: 375 - RNA, 22 nt, Homo sapiens
  source 1..22: mol_type = genomic RNA
gctatttcacgacaccagggtt

SEQ ID NO: 376 - RNA, 23 nt, Homo sapiens
  source 1..23: mol_type = genomic RNA
agctggtgttgtgaatcaggccg

SEQ ID NO: 377 - RNA, 23 nt, Homo sapiens
  source 1..23: mol_type = genomic RNA
tggagacgcggccctgttggagt

SEQ ID NO: 378 - RNA, 23 nt, Homo sapiens
  source 1..23: mol_type = genomic RNA
tctacagtgcacgtgtctccagt

SEQ ID NO: 379 - RNA, 21 nt, Homo sapiens
  source 1..21: mol_type = genomic RNA
taccacagggtagaaccacgg

SEQ ID NO: 380 - RNA, 22 nt, Homo sapiens
  source 1..22: mol_type = genomic RNA
cagtggttttaccctatggtag

SEQ ID NO: 381 - RNA, 22 nt, Homo sapiens
  source 1..22: mol_type = genomic RNA
taacactgtctggtaaagatgg

SEQ ID NO: 382 - RNA, 22 nt, Homo sapiens
  source 1..22: mol_type = genomic RNA
catcttccagtacagtgttgga

SEQ ID NO: 383 - RNA, 23 nt, Homo sapiens
  source 1..23: mol_type = genomic RNA
tgtagtgtttcctactttatgga

SEQ ID NO: 384 - RNA, 21 nt, Homo sapiens
  source 1..21: mol_type = genomic RNA
cataaagtagaaagcactact

SEQ ID NO: 385 - RNA, 21 nt, Homo sapiens
  source 1..21: mol_type = genomic RNA
tgagatgaagcactgtagctc

SEQ ID NO: 386 - RNA, 22 nt, Homo sapiens
  source 1..22: mol_type = genomic RNA
ggtgcagtgctgcatctctggt

SEQ ID NO: 387 - RNA, 20 nt, Homo sapiens
  source 1..20: mol_type = genomic RNA
tacagtatagatgatgtact

SEQ ID NO: 388 - RNA, 22 nt, Homo sapiens
  source 1..22: mol_type = genomic RNA
ggatatcatcatatactgtaag

SEQ ID NO: 389 - RNA, 22 nt, Homo sapiens
  source 1..22: mol_type = genomic RNA
ggattcctggaaatactgttct

SEQ ID NO: 390 - RNA, 23 nt, Homo sapiens
  source 1..23: mol_type = genomic RNA
gtccagttttcccaggaatccct

SEQ ID NO: 391 - RNA, 21 nt, Homo sapiens
  source 1..21: mol_type = genomic RNA
ctccgtttgcctgtttcgctg

SEQ ID NO: 392 - RNA, 22 nt, Homo sapiens
  source 1..22: mol_type = genomic RNA
ctcggcgcggggcgcgggctcc

SEQ ID NO: 393 - RNA, 22 nt, Homo sapiens
  source 1..22: mol_type = genomic RNA
cctctgaaattcagttcttcag

SEQ ID NO: 394 - RNA, 22 nt, Homo sapiens
  source 1..22: mol_type = genomic RNA
tgagaactgaattccatgggtt

SEQ ID NO: 395 - RNA, 22 nt, Homo sapiens
  source 1..22: mol_type = genomic RNA
tgccctgtggactcagttctgg

SEQ ID NO: 396 - RNA, 22 nt, Homo sapiens
  source 1..22: mol_type = genomic RNA
tgagaactgaattccataggct

SEQ ID NO: 397 - RNA, 21 nt, Homo sapiens
  source 1..21: mol_type = genomic RNA
gccctccgcccgtgcaccccg

SEQ ID NO: 398 - RNA, 22 nt, Homo sapiens
  source 1..22: mol_type = genomic RNA
gcccgcgtgtggagccaggtgt

SEQ ID NO: 399 - RNA, 20 nt, Homo sapiens
  source 1..20: mol_type = genomic RNA
gtgtgtggaaatgcttctgc

SEQ ID NO: 400 - RNA, 22 nt, Homo sapiens
  source 1..22: mol_type = genomic RNA
gtgtgcggaaatgcttctgcta

SEQ ID NO: 401 - RNA, 22 nt, Homo sapiens
  source 1..22: mol_type = genomic RNA
tcagtgcactacagaactttgt

SEQ ID NO: 402 - RNA, 22 nt, Homo sapiens
  source 1..22: mol_type = genomic RNA
aaagttctgagacactccgact

SEQ ID NO: 403 - RNA, 22 nt, Homo sapiens
  source 1..22: mol_type = genomic RNA
tcagtgcatcacagaactttgt

SEQ ID NO: 404 - RNA, 22 nt, Homo sapiens
  source 1..22: mol_type = genomic RNA
aagttctgttatacactcaggc

SEQ ID NO: 405 - RNA, 21 nt, Homo sapiens
  source 1..21: mol_type = genomic RNA
agggagggacgggggctgtgc

SEQ ID NO: 406 - RNA, 23 nt, Homo sapiens
  source 1..23: mol_type = genomic RNA
tctggctccgtgtcttcactccc

SEQ ID NO: 407 - RNA, 22 nt, Homo sapiens
  source 1..22: mol_type = genomic RNA
ctggtacaggcctgggggacag

SEQ ID NO: 408 - RNA, 22 nt, Homo sapiens
  source 1..22: mol_type = genomic RNA
tctcccaacccttgtaccagtg

SEQ ID NO: 409 - RNA, 21 nt, Homo sapiens
  source 1..21: mol_type = genomic RNA
ctagactgaagctccttgagg

SEQ ID NO: 410 - RNA, 21 nt, Homo sapiens
  source 1..21: mol_type = genomic RNA
tcgaggagctcacagtctagt

SEQ ID NO: 411 - RNA, 18 nt, Homo sapiens
  source 1..18: mol_type = genomic RNA
tcgaggagctcacagtct

SEQ ID NO: 412 - RNA, 21 nt, Homo sapiens
  source 1..21: mol_type = genomic RNA
tcagtgcatgacagaacttgg

SEQ ID NO: 413 - RNA, 22 nt, Homo sapiens
  source 1..22: mol_type = genomic RNA
ttgcatagtcacaaaagtgatc

SEQ ID NO: 414 - RNA, 22 nt, Homo sapiens
  source 1..22: mol_type = genomic RNA
aaaaccgtctagttacagttgt

SEQ ID NO: 415 - RNA, 23 nt, Homo sapiens
  source 1..23: mol_type = genomic RNA
cggcccgggctgctgctgttcct

SEQ ID NO: 416 - RNA, 21 nt, Homo sapiens
  source 1..21: mol_type = genomic RNA
tcctgcgcgtcccagatgccc

SEQ ID NO: 417 - RNA, 22 nt, Homo sapiens
  source 1..22: mol_type = genomic RNA
aatcatacacggttgacctatt

SEQ ID NO: 418 - RNA, 22 nt, Homo sapiens
  source 1..22: mol_type = genomic RNA
taggttatccgtgttgccttcg

SEQ ID NO: 419 - RNA, 22 nt, Homo sapiens
  source 1..22: mol_type = genomic RNA
ctcctacatattagcattaaca

SEQ ID NO: 420 - RNA, 23 nt, Homo sapiens
  source 1..23: mol_type = genomic RNA
ttaatgctaatcgtgataggggt

SEQ ID NO: 421 - RNA, 20 nt, Homo sapiens
  source 1..20: mol_type = genomic RNA
ttgggctgggctgggttggg

SEQ ID NO: 422 - RNA, 22 nt, Homo sapiens
  source 1..22: mol_type = genomic RNA
caggccatattgtgctgcctca

SEQ ID NO: 423 - RNA, 22 nt, Homo sapiens
  source 1..22: mol_type = genomic RNA
tagcagcacataatggtttgtg

SEQ ID NO: 424 - RNA, 22 nt, Homo sapiens
  source 1..22: mol_type = genomic RNA
cgaatcattatttgctgctcta

SEQ ID NO: 425 - RNA, 22 nt, Homo sapiens
  source 1..22: mol_type = genomic RNA
tagcagcacatcatggtttaca

SEQ ID NO: 426 - RNA, 22 nt, Homo sapiens
  source 1..22: mol_type = genomic RNA
ccagtattaactgtgctgctga

SEQ ID NO: 427 - RNA, 22 nt, Homo sapiens
  source 1..22: mol_type = genomic RNA
ccaatattactgtgctgcttta

SEQ ID NO: 428 - RNA, 22 nt, Homo sapiens
  source 1..22: mol_type = genomic RNA
tagcagcacgtaaatattggcg

SEQ ID NO: 429 - RNA, 22 nt, Homo sapiens
  source 1..22: mol_type = genomic RNA
actgcagtgaaggcacttgtag

SEQ ID NO: 430 - RNA, 23 nt, Homo sapiens
  source 1..23: mol_type = genomic RNA
caaagtgcttacagtgcaggtag

SEQ ID NO: 431 - RNA, 22 nt, Homo sapiens
  source 1..22: mol_type = genomic RNA
accactgaccgttgactgtacc

SEQ ID NO: 432 - RNA, 22 nt, Homo sapiens
  source 1..22: mol_type = genomic RNA
accatcgaccgttgattgtacc

SEQ ID NO: 433 - RNA, 23 nt, Homo sapiens
  source 1..23: mol_type = genomic RNA
aacattcaacgctgtcggtgagt

SEQ ID NO: 434 - RNA, 21 nt, Homo sapiens
  source 1..21: mol_type = genomic RNA
ctcactgaacaatgaatgcaa

SEQ ID NO: 435 - RNA, 23 nt, Homo sapiens
  source 1..23: mol_type = genomic RNA
aacattcattgctgtcggtgggt

SEQ ID NO: 436 - RNA, 22 nt, Homo sapiens
  source 1..22: mol_type = genomic RNA
aaccatcgaccgttgagtggac

SEQ ID NO: 437 - RNA, 22 nt, Homo sapiens
  source 1..22: mol_type = genomic RNA
aacattcaacctgtcggtgagt

SEQ ID NO: 438 - RNA, 23 nt, Homo sapiens
  source 1..23: mol_type = genomic RNA
aacattcattgttgtcggtgggt

SEQ ID NO: 439 - RNA, 21 nt, Homo sapiens
  source 1..21: mol_type = genomic RNA
tggttctagacttgccaacta

SEQ ID NO: 440 - RNA, 18 nt, Homo sapiens
  source 1..18: mol_type = genomic RNA
tccagtgccctcctctcc

SEQ ID NO: 441 - RNA, 24 nt, Homo sapiens
  source 1..24: mol_type = genomic RNA
tttggcaatggtagaactcacact

SEQ ID NO: 442 - RNA, 18 nt, Homo sapiens
  source 1..18: mol_type = genomic RNA
tgaggcagtagattgaat

SEQ ID NO: 443 - RNA, 22 nt, Homo sapiens
  source 1..22: mol_type = genomic RNA
gtgaattaccgaagggccataa

SEQ ID NO: 444 - RNA, 22 nt, Homo sapiens
  source 1..22: mol_type = genomic RNA
tatggcactggtagaattcact

SEQ ID NO: 445 - RNA, 22 nt, Homo sapiens
  source 1..22: mol_type = genomic RNA
tggacggagaactgataagggt

SEQ ID NO: 446 - RNA, 22 nt, Homo sapiens
  source 1..22: mol_type = genomic RNA
aggggctggctttcctctggtc

SEQ ID NO: 447 - RNA, 22 nt, Homo sapiens
  source 1..22: mol_type = genomic RNA
tggagagaaaggcagttcctga

SEQ ID NO: 448 - RNA, 22 nt, Homo sapiens
  source 1..22: mol_type = genomic RNA
gcccaaaggtgaattttttggg

SEQ ID NO: 449 - RNA, 22 nt, Homo sapiens
  source 1..22: mol_type = genomic RNA
caaagaattctccttttgggct

SEQ ID NO: 450 - RNA, 22 nt, Homo sapiens
  source 1..22: mol_type = genomic RNA
tcgtgtcttgtgttgcagccgg

SEQ ID NO: 451 - RNA, 22 nt, Homo sapiens
  source 1..22: mol_type = genomic RNA
ggctacaacacaggacccgggc

SEQ ID NO: 452 - RNA, 21 nt, Homo sapiens
  source 1..21: mol_type = genomic RNA
ctcccacatgcagggtttgca

SEQ ID NO: 453 - RNA, 21 nt, Homo sapiens
  source 1..21: mol_type = genomic RNA
catcccttgcatggtggaggg

SEQ ID NO: 454 - RNA, 23 nt, Homo sapiens
  source 1..23: mol_type = genomic RNA
actgccctaagtgctccttctgg

SEQ ID NO: 455 - RNA, 23 nt, Homo sapiens
  source 1..23: mol_type = genomic RNA
taaggtgcatctagtgcagatag

SEQ ID NO: 456 - RNA, 22 nt, Homo sapiens
  source 1..22: mol_type = genomic RNA
tgccctaaatgccccttctggc

SEQ ID NO: 457 - RNA, 23 nt, Homo sapiens
  source 1..23: mol_type = genomic RNA
taaggtgcatctagtgcagttag

SEQ ID NO: 458 - RNA, 21 nt, Homo sapiens
  source 1..21: mol_type = genomic RNA
cggcggggacggcgattggtc

SEQ ID NO: 459 - RNA, 22 nt, Homo sapiens
  source 1..22: mol_type = genomic RNA
cgcaggggccgggtgctcaccg

SEQ ID NO: 460 - RNA, 21 nt, Homo sapiens
  source 1..21: mol_type = genomic RNA
tgagtgccggtgcctgccctg

SEQ ID NO: 461 - RNA, 22 nt, Homo sapiens
  source 1..22: mol_type = genomic RNA
tgatatgtttgatatattaggt

SEQ ID NO: 462 - RNA, 21 nt, Homo sapiens
  source 1..21: mol_type = genomic RNA
tgatatgtttgatattgggtt

SEQ ID NO: 463 - RNA, 21 nt, Homo sapiens
  source 1..21: mol_type = genomic RNA
ccagtcctgtgcctgccgcct

SEQ ID NO: 464 - RNA, 20 nt, Homo sapiens
  source 1..20: mol_type = genomic RNA
caccaggcattgtggtctcc

SEQ ID NO: 465 - RNA, 23 nt, Homo sapiens
  source 1..23: mol_type = genomic RNA
tgagtaccgccatgtctgttggg

SEQ ID NO: 466 - RNA, 22 nt, Homo sapiens
  source 1..22: mol_type = genomic RNA
tacccagagcatgcagtgtgaa

SEQ ID NO: 467 - RNA, 22 nt, Homo sapiens
  source 1..22: mol_type = genomic RNA
tctgccccctccgctgctgcca

SEQ ID NO: 468 - RNA, 22 nt, Homo sapiens
  source 1..22: mol_type = genomic RNA
gctgcgcttggatttcgtcccc

SEQ ID NO: 469 - RNA, 22 nt, Homo sapiens
  source 1..22: mol_type = genomic RNA
ggaggggtcccgcactgggagg

SEQ ID NO: 470 - RNA, 22 nt, Homo sapiens
  source 1..22: mol_type = genomic RNA
ccctgtgcccggcccacttctg

SEQ ID NO: 471 - RNA, 20 nt, Homo sapiens
  source 1..20: mol_type = genomic RNA
ccccagggcgacgcggcggg

SEQ ID NO: 472 - RNA, 22 nt, Homo sapiens
  source 1..22: mol_type = genomic RNA
accttgccttgctgcccgggcc

SEQ ID NO: 473 - RNA, 23 nt, Homo sapiens
  source 1..23: mol_type = genomic RNA
caacggaatcccaaaagcagctg

SEQ ID NO: 474 - RNA, 22 nt, Homo sapiens
  source 1..22: mol_type = genomic RNA
ctgccaattccataggtcacag

SEQ ID NO: 475 - RNA, 21 nt, Homo sapiens
  source 1..21: mol_type = genomic RNA
ctgacctatgaattgacagcc

SEQ ID NO: 476 - RNA, 22 nt, Homo sapiens
  source 1..22: mol_type = genomic RNA
aactggcctacaaagtcccagt

SEQ ID NO: 477 - RNA, 22 nt, Homo sapiens
  source 1..22: mol_type = genomic RNA
tgggtctttgcgggcgagatga

SEQ ID NO: 478 - RNA, 22 nt, Homo sapiens
  source 1..22: mol_type = genomic RNA
aactggccctcaaagtcccgct

SEQ ID NO: 479 - RNA, 22 nt, Homo sapiens
  source 1..22: mol_type = genomic RNA
cggggttttgagggcgagatga

SEQ ID NO: 480 - RNA, 22 nt, Homo sapiens
  source 1..22: mol_type = genomic RNA
ccagtggggctgctgttatctg

SEQ ID NO: 481 - RNA, 22 nt, Homo sapiens
  source 1..22: mol_type = genomic RNA
tgtaacagcaactccatgtgga

SEQ ID NO: 482 - RNA, 22 nt, Homo sapiens
  source 1..22: mol_type = genomic RNA
ccaatattggctgtgctgctcc

SEQ ID NO: 483 - RNA, 21 nt, Homo sapiens
  source 1..21: mol_type = genomic RNA
tagcagcacagaaatattggc

SEQ ID NO: 484 - RNA, 22 nt, Homo sapiens
  source 1..22: mol_type = genomic RNA
cggcaacaagaaactgcctgag

SEQ ID NO: 485 - RNA, 22 nt, Homo sapiens
  source 1..22: mol_type = genomic RNA
taggtagtttcatgttgttggg

SEQ ID NO: 486 - RNA, 22 nt, Homo sapiens
  source 1..22: mol_type = genomic RNA
tcgacagcacgacactgccttc

SEQ ID NO: 487 - RNA, 22 nt, Homo sapiens
  source 1..22: mol_type = genomic RNA
taggtagtttcctgttgttggg

SEQ ID NO: 488 - RNA, 22 nt, Homo sapiens
  source 1..22: mol_type = genomic RNA
tcaggccaggcacagtggctca

SEQ ID NO: 489 - RNA, 19 nt, Homo sapiens
  source 1..19: mol_type = genomic RNA
accgtgcaaaggtagcata

SEQ ID NO: 490 - RNA, 22 nt, Homo sapiens
  source 1..22: mol_type = genomic RNA
ttcaccaccttctccacccagc

SEQ ID NO: 491 - RNA, 23 nt, Homo sapiens
  source 1..23: mol_type = genomic RNA
cgggtagagagggcagtgggagg

SEQ ID NO: 492 - RNA, 20 nt, Homo sapiens
  source 1..20: mol_type = genomic RNA
cctcctgccctccttgctgt

SEQ ID NO: 493 - RNA, 22 nt, Homo sapiens
  source 1..22: mol_type = genomic RNA
ggtccagaggggagataggttc

SEQ ID NO: 494 - RNA, 22 nt, Homo sapiens
  source 1..22: mol_type = genomic RNA
acagtagtctgcacattggtta

SEQ ID NO: 495 - RNA, 23 nt, Homo sapiens
  source 1..23: mol_type = genomic RNA
cccagtgttcagactacctgttc

SEQ ID NO: 496 - RNA, 22 nt, Homo sapiens
  source 1..22: mol_type = genomic RNA
acagtagtctgcacattggtta

SEQ ID NO: 497 - RNA, 23 nt, Homo sapiens
  source 1..23: mol_type = genomic RNA
cccagtgtttagactatctgttc

SEQ ID NO: 498 - RNA, 23 nt, Homo sapiens
  source 1..23: mol_type = genomic RNA
tgtgcaaatctatgcaaaactga

SEQ ID NO: 499 - RNA, 22 nt, Homo sapiens
  source 1..22: mol_type = genomic RNA
agttttgcatagttgcactaca

SEQ ID NO: 500 - RNA, 23 nt, Homo sapiens
  source 1..23: mol_type = genomic RNA
agttttgcaggtttgcatccagc

SEQ ID NO: 501 - RNA, 22 nt, Homo sapiens
  source 1..22: mol_type = genomic RNA
agttttgcaggtttgcatttca

SEQ ID NO: 502 - RNA, 23 nt, Homo sapiens
  source 1..23: mol_type = genomic RNA
tgtgcaaatccatgcaaaactga

SEQ ID NO: 503 - RNA, 22 nt, Homo sapiens
  source 1..22: mol_type = genomic RNA
taacactgtctggtaacgatgt

SEQ ID NO: 504 - RNA, 22 nt, Homo sapiens
  source 1..22: mol_type = genomic RNA
catcttaccggacagtgctgga

SEQ ID NO: 505 - RNA, 22 nt, Homo sapiens
  source 1..22: mol_type = genomic RNA
taatactgcctggtaatgatga

SEQ ID NO: 506 - RNA, 22 nt, Homo sapiens
  source 1..22: mol_type = genomic RNA
catcttactgggcagcattgga

SEQ ID NO: 507 - RNA, 23 nt, Homo sapiens
  source 1..23: mol_type = genomic RNA
taatactgccgggtaatgatgga

SEQ ID NO: 508 - RNA, 22 nt, Homo sapiens
  source 1..22: mol_type = genomic RNA
cgtcttacccagcagtgtttgg

SEQ ID NO: 509 - RNA, 20 nt, Homo sapiens
  source 1..20: mol_type = genomic RNA
agaggtatagggcatgggaa

SEQ ID NO: 510 - RNA, 22 nt, Homo sapiens
  source 1..22: mol_type = genomic RNA
ttcctatgcatatacttctttg

SEQ ID NO: 511 - RNA, 22 nt, Homo sapiens
  source 1..22: mol_type = genomic RNA
gtgaaatgtttaggaccactag

SEQ ID NO: 512 - RNA, 23 nt, Homo sapiens
  source 1..23: mol_type = genomic RNA
ttgaactgttaagaaccactgga

SEQ ID NO: 513 - RNA, 22 nt, Homo sapiens
  source 1..22: mol_type = genomic RNA
tagtggtcctaaacatttcaca

SEQ ID NO: 514 - RNA, 21 nt, Homo sapiens
  source 1..21: mol_type = genomic RNA
gctgggaaggcaaagggacgt

SEQ ID NO: 515 - RNA, 22 nt, Homo sapiens
  source 1..22: mol_type = genomic RNA
ttccctttgtcatcctatgcct

SEQ ID NO: 516 - RNA, 20 nt, Homo sapiens
  source 1..20: mol_type = genomic RNA
tgttttgataacagtaatgt

SEQ ID NO: 517 - RNA, 23 nt, Homo sapiens
  source 1..23: mol_type = genomic RNA
gtgttaattaaacctctatttac

SEQ ID NO: 518 - RNA, 21 nt, Homo sapiens
  source 1..21: mol_type = genomic RNA
gatttcagtggagtgaagttc

SEQ ID NO: 519 - RNA, 23 nt, Homo sapiens
  source 1..23: mol_type = genomic RNA
ctgtaatataaatttaatttatt

SEQ ID NO: 520 - RNA, 22 nt, Homo sapiens
  source 1..22: mol_type = genomic RNA
tccttcattccaccggagtctg

SEQ ID NO: 521 - RNA, 22 nt, Homo sapiens
  source 1..22: mol_type = genomic RNA
tggaatgtaaggaagtgtgtgg

SEQ ID NO: 522 - RNA, 22 nt, Homo sapiens
  source 1..22: mol_type = genomic RNA
ataagacgagcaaaaagcttgt

SEQ ID NO: 523 - RNA, 22 nt, Homo sapiens
  source 1..22: mol_type = genomic RNA
ataagacgaacaaaaggtttgt

SEQ ID NO: 524 - RNA, 22 nt, Homo sapiens
  source 1..22: mol_type = genomic RNA
actgcattatgagcacttaaag

SEQ ID NO: 525 - RNA, 23 nt, Homo sapiens
  source 1..23: mol_type = genomic RNA
taaagtgcttatagtgcaggtag

SEQ ID NO: 526 - RNA, 22 nt, Homo sapiens
  source 1..22: mol_type = genomic RNA
actgtagtatgggcacttccag

SEQ ID NO: 527 - RNA, 23 nt, Homo sapiens
  source 1..23: mol_type = genomic RNA
caaagtgctcatagtgcaggtag

SEQ ID NO: 528 - RNA, 22 nt, Homo sapiens
  source 1..22: mol_type = genomic RNA
ctgtgcgtgtgacagcggctga

SEQ ID NO: 529 - RNA, 22 nt, Homo sapiens
  source 1..22: mol_type = genomic RNA
ttggggaaacggccgctgagtg

SEQ ID NO: 530 - RNA, 21 nt, Homo sapiens
  source 1..21: mol_type = genomic RNA
atttgtgcttggctctgtcac

SEQ ID NO: 531 - RNA, 21 nt, Homo sapiens
  source 1..21: mol_type = genomic RNA
gcagggacagcaaaggggtgc

SEQ ID NO: 532 - RNA, 21 nt, Homo sapiens
  source 1..21: mol_type = genomic RNA
cgagcctcaagcaagggactt

SEQ ID NO: 533 - RNA, 22 nt, Homo sapiens
  source 1..22: mol_type = genomic RNA
tagtcccttccttgaagcggtc

SEQ ID NO: 534 - RNA, 22 nt, Homo sapiens
  source 1..22: mol_type = genomic RNA
catcagaattcatggaggctag

SEQ ID NO: 535 - RNA, 22 nt, Homo sapiens
  source 1..22: mol_type = genomic RNA
agcttccatgactcctgatgga

SEQ ID NO: 536 - RNA, 22 nt, Homo sapiens
  source 1..22: mol_type = genomic RNA
ttccctttgtcatccttcgcct

SEQ ID NO: 537 - RNA, 21 nt, Homo sapiens
  source 1..21: mol_type = genomic RNA
cctcccatgccaagaactccc

SEQ ID NO: 538 - RNA, 21 nt, Homo sapiens
  source 1..21: mol_type = genomic RNA
ggttcttagcataggaggtct

SEQ ID NO: 539 - RNA, 21 nt, Homo sapiens
  source 1..21: mol_type = genomic RNA
tgttctctttgccaaggacag

SEQ ID NO: 540 - RNA, 21 nt, Homo sapiens
  source 1..21: mol_type = genomic RNA
taacagtctccagtcacggcc

SEQ ID NO: 541 - RNA, 23 nt, Homo sapiens
  source 1..23: mol_type = genomic RNA
accttggctctagactgcttact

SEQ ID NO: 542 - RNA, 21 nt, Homo sapiens
  source 1..21: mol_type = genomic RNA
caacaccagtcgatgggctgt

SEQ ID NO: 543 - RNA, 22 nt, Homo sapiens
  source 1..22: mol_type = genomic RNA
acagcaggcacagacaggcagt

SEQ ID NO: 544 - RNA, 22 nt, Homo sapiens
  source 1..22: mol_type = genomic RNA
tgcctgtctacacttgctgtgc

SEQ ID NO: 545 - RNA, 21 nt, Homo sapiens
  source 1..21: mol_type = genomic RNA
atgacctatgaattgacagac

SEQ ID NO: 546 - RNA, 22 nt, Homo sapiens
  source 1..22: mol_type = genomic RNA
tagcttatcagactgatgttga

SEQ ID NO: 547 - RNA, 22 nt, Homo sapiens
  source 1..22: mol_type = genomic RNA
tcacagtggtctctgggattat

SEQ ID NO: 548 - RNA, 22 nt, Homo sapiens
  source 1..22: mol_type = genomic RNA
taatctcagctggcaactgtga

SEQ ID NO: 549 - RNA, 22 nt, Homo sapiens
  source 1..22: mol_type = genomic RNA
aaatctctgcaggcaaatgtga

SEQ ID NO: 550 - RNA, 23 nt, Homo sapiens
  source 1..23: mol_type = genomic RNA
tactgcatcaggaactgattgga

SEQ ID NO: 551 - RNA, 22 nt, Homo sapiens
  source 1..22: mol_type = genomic RNA
atggttccgtcaagcaccatgg

SEQ ID NO: 552 - RNA, 22 nt, Homo sapiens
  source 1..22: mol_type = genomic RNA
catggttctgtcaagcaccgcg

SEQ ID NO: 553 - RNA, 21 nt, Homo sapiens
  source 1..21: mol_type = genomic RNA
ttgtgcttgatctaaccatgt

SEQ ID NO: 554 - RNA, 22 nt, Homo sapiens
  source 1..22: mol_type = genomic RNA
agagttgagtctggacgtcccg

SEQ ID NO: 555 - RNA, 22 nt, Homo sapiens
  source 1..22: mol_type = genomic RNA
agaattgtggctggacatctgt

SEQ ID NO: 556 - RNA, 21 nt, Homo sapiens
  source 1..21: mol_type = genomic RNA
tgattgtccaaacgcaattct

SEQ ID NO: 557 - RNA, 23 nt, Homo sapiens
  source 1..23: mol_type = genomic RNA
agctacattgtctgctgggtttc

SEQ ID NO: 558 - RNA, 22 nt, Homo sapiens
  source 1..22: mol_type = genomic RNA
acctggcatacaatgtagattt

SEQ ID NO: 559 - RNA, 21 nt, Homo sapiens
  source 1..21: mol_type = genomic RNA
agctacatctggctactgggt

SEQ ID NO: 560 - RNA, 22 nt, Homo sapiens
  source 1..22: mol_type = genomic RNA
ctcagtagccagtgtagatcct

SEQ ID NO: 561 - RNA, 22 nt, Homo sapiens
  source 1..22: mol_type = genomic RNA
tgtcagtttgtcaaatacccca

SEQ ID NO: 562 - RNA, 22 nt, Homo sapiens
  source 1..22: mol_type = genomic RNA
cgtgtatttgacaagctgagtt

SEQ ID NO: 563 - RNA, 22 nt, Homo sapiens
  source 1..22: mol_type = genomic RNA
aagctgccagttgaagaactgt

SEQ ID NO: 564 - RNA, 23 nt, Homo sapiens
  source 1..23: mol_type = genomic RNA
aaaatggtgccctagtgactaca

SEQ ID NO: 565 - RNA, 21 nt, Homo sapiens
  source 1..21: mol_type = genomic RNA
caagtcactagtggttccgtt

SEQ ID NO: 566 - RNA, 22 nt, Homo sapiens
  source 1..22: mol_type = genomic RNA
agttcttcagtggcaagcttta

SEQ ID NO: 567 - RNA, 22 nt, Homo sapiens
  source 1..22: mol_type = genomic RNA
tctgcaagtgtcagaggcgagg

SEQ ID NO: 568 - RNA, 21 nt, Homo sapiens
  source 1..21: mol_type = genomic RNA
tgacagcgccctgcctggctc

SEQ ID NO: 569 - RNA, 24 nt, Homo sapiens
  source 1..24: mol_type = genomic RNA
agcgcgggctgagcgctgccagtc

SEQ ID NO: 570 - RNA, 22 nt, Homo sapiens
  source 1..22: mol_type = genomic RNA
gagagcagtgtgtgttgcctgg

SEQ ID NO: 571 - RNA, 22 nt, Homo sapiens
  source 1..22: mol_type = genomic RNA
attgtccttgctgtttggagat

SEQ ID NO: 572 - RNA, 21 nt, Homo sapiens
  source 1..21: mol_type = genomic RNA
atccccagatacaatggacaa

SEQ ID NO: 573 - RNA, 20 nt, Homo sapiens
  source 1..20: mol_type = genomic RNA
taggatgggggtgagaggtg

SEQ ID NO: 574 - RNA, 21 nt, Homo sapiens
  source 1..21: mol_type = genomic RNA
atcacattgccagggatttcc

SEQ ID NO: 575 - RNA, 22 nt, Homo sapiens
  source 1..22: mol_type = genomic RNA
ggggttcctggggatgggattt

SEQ ID NO: 576 - RNA, 21 nt, Homo sapiens
  source 1..21: mol_type = genomic RNA
atcacattgccagggattacc

SEQ ID NO: 577 - RNA, 22 nt, Homo sapiens
  source 1..22: mol_type = genomic RNA
tgggttcctggcatgctgattt

SEQ ID NO: 578 - RNA, 22 nt, Homo sapiens
  source 1..22: mol_type = genomic RNA
atcacattgccagtgattaccc

SEQ ID NO: 579 - RNA, 22 nt, Homo sapiens
  source 1..22: mol_type = genomic RNA
tgcctactgagctgatatcagt

SEQ ID NO: 580 - RNA, 22 nt, Homo sapiens
  source 1..22: mol_type = genomic RNA
tgcctactgagctgaaacacag

SEQ ID NO: 581 - RNA, 22 nt, Homo sapiens
  source 1..22: mol_type = genomic RNA
tggctcagttcagcaggaacag

SEQ ID NO: 582 - RNA, 22 nt, Homo sapiens
  source 1..22: mol_type = genomic RNA
agcagaggcagagaggctcagg

SEQ ID NO: 583 - RNA, 23 nt, Homo sapiens
  source 1..23: mol_type = genomic RNA
tgaggctctgttagccttggctc

SEQ ID NO: 584 - RNA, 22 nt, Homo sapiens
  source 1..22: mol_type = genomic RNA
cattgcacttgtctcggtctga

SEQ ID NO: 585 - RNA, 21 nt, Homo sapiens
  source 1..21: mol_type = genomic RNA
aggcggagacttgggcaattg

SEQ ID NO: 586 - RNA, 22 nt, Homo sapiens
  source 1..22: mol_type = genomic RNA
tatcatggagttggtaaagcac

SEQ ID NO: 587 - RNA, 22 nt, Homo sapiens
  source 1..22: mol_type = genomic RNA
gttttaccacctccaggagact

SEQ ID NO: 588 - RNA, 22 nt, Homo sapiens
  source 1..22: mol_type = genomic RNA
cgcctcttcagcgctgtcttcc

SEQ ID NO: 589 - RNA, 23 nt, Homo sapiens
  source 1..23: mol_type = genomic RNA
caggcagtgactgttcagacgtc

SEQ ID NO: 590 - RNA, 22 nt, Homo sapiens
  source 1..22: mol_type = genomic RNA
cctattcttggttacttgcacg

SEQ ID NO: 591 - RNA, 22 nt, Homo sapiens
  source 1..22: mol_type = genomic RNA
cctattcttgattacttgtttc

SEQ ID NO: 592 - RNA, 22 nt, Homo sapiens
  source 1..22: mol_type = genomic RNA
ttcaagtaatccaggataggct

SEQ ID NO: 593 - RNA, 22 nt, Homo sapiens
  source 1..22: mol_type = genomic RNA
cctgttctccattacttggctc

SEQ ID NO: 594 - RNA, 21 nt, Homo sapiens
  source 1..21: mol_type = genomic RNA
ttcaagtaattcaggataggt

SEQ ID NO: 595 - RNA, 21 nt, Homo sapiens
  source 1..21: mol_type = genomic RNA
ttcacagtggctaagttccgc

SEQ ID NO: 596 - RNA, 22 nt, Homo sapiens
  source 1..22: mol_type = genomic RNA
agggcttagctgcttgtgagca

SEQ ID NO: 597 - RNA, 21 nt, Homo sapiens
  source 1..21: mol_type = genomic RNA
ttcacagtggctaagttctgc

SEQ ID NO: 598 - RNA, 22 nt, Homo sapiens
  source 1..22: mol_type = genomic RNA
agagcttagctgattggtgaac

SEQ ID NO: 599 - RNA, 22 nt, Homo sapiens
  source 1..22: mol_type = genomic RNA
cactagattgtgagctcctgga

SEQ ID NO: 600 - RNA, 22 nt, Homo sapiens
  source 1..22: mol_type = genomic RNA
aaggagctcacagtctattgag

SEQ ID NO: 601 - RNA, 19 nt, Homo sapiens
  source 1..19: mol_type = genomic RNA
ggggcctggcggtgggcgg

SEQ ID NO: 602 - RNA, 21 nt, Homo sapiens
  source 1..21: mol_type = genomic RNA
gttagggccaacatctcttgg

SEQ ID NO: 603 - RNA, 22 nt, Homo sapiens
  source 1..22: mol_type = genomic RNA
gagggttgggtggaggctctcc

SEQ ID NO: 604 - RNA, 23 nt, Homo sapiens
  source 1..23: mol_type = genomic RNA
agaattgcgtttggacaatcagt

SEQ ID NO: 605 - RNA, 22 nt, Homo sapiens
  source 1..22: mol_type = genomic RNA
agatgtccagccacaattctcg

SEQ ID NO: 606 - RNA, 21 nt, Homo sapiens
  source 1..21: mol_type = genomic RNA
agggccccccctcaatcctgt

SEQ ID NO: 607 - RNA, 21 nt, Homo sapiens
  source 1..21: mol_type = genomic RNA
atgtatgtgtgcatgtgcatg

SEQ ID NO: 608 - RNA, 24 nt, Homo sapiens
  source 1..24: mol_type = genomic RNA
agcagaagcagggaggttctccca

SEQ ID NO: 609 - RNA, 22 nt, Homo sapiens
  source 1..22: mol_type = genomic RNA
tatgtgggatggtaaaccgctt

SEQ ID NO: 610 - RNA, 22 nt, Homo sapiens
  source 1..22: mol_type = genomic RNA
tggtttaccgtcccacatacat

SEQ ID NO: 611 - RNA, 22 nt, Homo sapiens
  source 1..22: mol_type = genomic RNA
tagcaccatctgaaatcggtta

SEQ ID NO: 612 - RNA, 22 nt, Homo sapiens
  source 1..22: mol_type = genomic RNA
actgatttcttttggtgttcag

SEQ ID NO: 613 - RNA, 24 nt, Homo sapiens
  source 1..24: mol_type = genomic RNA
gctggtttcatatggtggtttaga

SEQ ID NO: 614 - RNA, 22 nt, Homo sapiens
  source 1..22: mol_type = genomic RNA
ctggtttcacatggtggcttag

SEQ ID NO: 615 - RNA, 23 nt, Homo sapiens
  source 1..23: mol_type = genomic RNA
tagcaccatttgaaatcagtgtt

SEQ ID NO: 616 - RNA, 22 nt, Homo sapiens
  source 1..22: mol_type = genomic RNA
tagcaccatttgaaatcggtta

SEQ ID NO: 617 - RNA, 22 nt, Homo sapiens
  source 1..22: mol_type = genomic RNA
tgaccgatttctcctggtgttc

SEQ ID NO: 618 - RNA, 22 nt, Homo sapiens
  source 1..22: mol_type = genomic RNA
tatacaagggcagactctctct

SEQ ID NO: 619 - RNA, 23 nt, Homo sapiens
  source 1..23: mol_type = genomic RNA
cagtgcaatagtattgtcaaagc

SEQ ID NO: 620 - RNA, 22 nt, Homo sapiens
  source 1..22: mol_type = genomic RNA
gctctgactttattgcactact

SEQ ID NO: 621 - RNA, 23 nt, Homo sapiens
  source 1..23: mol_type = genomic RNA
cagtgcaatgatattgtcaaagc

SEQ ID NO: 622 - RNA, 23 nt, Homo sapiens
  source 1..23: mol_type = genomic RNA
taagtgcttccatgttttggtga

SEQ ID NO: 623 - RNA, 23 nt, Homo sapiens
  source 1..23: mol_type = genomic RNA
acttaaacgtggatgtacttgct

SEQ ID NO: 624 - RNA, 23 nt, Homo sapiens
  source 1..23: mol_type = genomic RNA
taagtgcttccatgttttagtag

SEQ ID NO: 625 - RNA, 22 nt, Homo sapiens
  source 1..22: mol_type = genomic RNA
actttaacatggaagtgctttc

SEQ ID NO: 626 - RNA, 23 nt, Homo sapiens
  source 1..23: mol_type = genomic RNA
taagtgcttccatgtttcagtgg

SEQ ID NO: 627 - RNA, 22 nt, Homo sapiens
  source 1..22: mol_type = genomic RNA
tttaacatgggggtacctgctg

SEQ ID NO: 628 - RNA, 23 nt, Homo sapiens
  source 1..23: mol_type = genomic RNA
taagtgcttccatgtttgagtgt

SEQ ID NO: 629 - RNA, 22 nt, Homo sapiens
  source 1..22: mol_type = genomic RNA
actttaacatggaggcacttgc

SEQ ID NO: 630 - RNA, 17 nt, Homo sapiens
  source 1..17: mol_type = genomic RNA
taagtgcttccatgctt

SEQ ID NO: 631 - RNA, 17 nt, Homo sapiens
  source 1..17: mol_type = genomic RNA
taattgcttccatgttt

SEQ ID NO: 632 - RNA, 23 nt, Homo sapiens
  source 1..23: mol_type = genomic RNA
ttgccacactgcaacaccttaca

SEQ ID NO: 633 - RNA, 21 nt, Homo sapiens
  source 1..21: mol_type = genomic RNA
tctggctgttgtggtgtgcaa

SEQ ID NO: 634 - RNA, 23 nt, Homo sapiens
  source 1..23: mol_type = genomic RNA
tcagcaccaggatattgttggag

SEQ ID NO: 635 - RNA, 23 nt, Homo sapiens
  source 1..23: mol_type = genomic RNA
tcaacaaaatcactgatgctgga

SEQ ID NO: 636 - RNA, 22 nt, Homo sapiens
  source 1..22: mol_type = genomic RNA
gatatcagctcagtaggcaccg

SEQ ID NO: 637 - RNA, 21 nt, Homo sapiens
  source 1..21: mol_type = genomic RNA
gttcctgctgaactgagccag

SEQ ID NO: 638 - RNA, 22 nt, Homo sapiens
  source 1..22: mol_type = genomic RNA
ctttcagtcggatgtttgcagc

SEQ ID NO: 639 - RNA, 22 nt, Homo sapiens
  source 1..22: mol_type = genomic RNA
tgtaaacatcctcgactggaag

SEQ ID NO: 640 - RNA, 22 nt, Homo sapiens
  source 1..22: mol_type = genomic RNA
ctgggaggtggatgtttacttc

SEQ ID NO: 641 - RNA, 22 nt, Homo sapiens
  source 1..22: mol_type = genomic RNA
tgtaaacatcctacactcagct

SEQ ID NO: 642 - RNA, 22 nt, Homo sapiens
  source 1..22: mol_type = genomic RNA
ctgggagagggttgtttactcc

SEQ ID NO: 643 - RNA, 22 nt, Homo sapiens
  source 1..22: mol_type = genomic RNA
ctgggagaaggctgtttactct

SEQ ID NO: 644 - RNA, 23 nt, Homo sapiens
  source 1..23: mol_type = genomic RNA
tgtaaacatcctacactctcagc

SEQ ID NO: 645 - RNA, 22 nt, Homo sapiens
  source 1..22: mol_type = genomic RNA
ctttcagtcagatgtttgctgc

SEQ ID NO: 646 - RNA, 22 nt, Homo sapiens
  source 1..22: mol_type = genomic RNA
tgtaaacatccccgactggaag

SEQ ID NO: 647 - RNA, 22 nt, Homo sapiens
  source 1..22: mol_type = genomic RNA
ctttcagtcggatgtttacagc

SEQ ID NO: 648 - RNA, 22 nt, Homo sapiens
  source 1..22: mol_type = genomic RNA
tgtaaacatccttgactggaag

SEQ ID NO: 649 - RNA, 20 nt, Homo sapiens
  source 1..20: mol_type = genomic RNA
atatgggtttactagttggt

SEQ ID NO: 650 - RNA, 22 nt, Homo sapiens
  source 1..22: mol_type = genomic RNA
tgcctggaacatagtagggact

SEQ ID NO: 651 - RNA, 21 nt, Homo sapiens
  source 1..21: mol_type = genomic RNA
ataggactcatatagtgccag

SEQ ID NO: 652 - RNA, 20 nt, Homo sapiens
  source 1..20: mol_type = genomic RNA
agacactatacgagtcatat

SEQ ID NO: 653 - RNA, 23 nt, Homo sapiens
  source 1..23: mol_type = genomic RNA
tgtgactgcattatgaaaattct

SEQ ID NO: 654 - RNA, 20 nt, Homo sapiens
  source 1..20: mol_type = genomic RNA
tggcttttaactttgatggc

SEQ ID NO: 655 - RNA, 21 nt, Homo sapiens
  source 1..21: mol_type = genomic RNA
cacagcaagtgtagacaggca

SEQ ID NO: 656 - RNA, 21 nt, Homo sapiens
  source 1..21: mol_type = genomic RNA
cctgtctgtgcctgctgtaca

SEQ ID NO: 657 - RNA, 22 nt, Homo sapiens
  source 1..22: mol_type = genomic RNA
taaatagagtaggcaaaggaca

SEQ ID NO: 658 - RNA, 22 nt, Homo sapiens
  source 1..22: mol_type = genomic RNA
tcctttgcctattctatttaag

SEQ ID NO: 659 - RNA, 22 nt, Homo sapiens
  source 1..22: mol_type = genomic RNA
gttgggacaagaggacggtctt

SEQ ID NO: 660 - RNA, 17 nt, Homo sapiens
  source 1..17: mol_type = genomic RNA
cagagaattgtttaatc

SEQ ID NO: 661 - RNA, 22 nt, Homo sapiens
  source 1..22: mol_type = genomic RNA
actttcctcactcccgtgaagt

SEQ ID NO: 662 - RNA, 21 nt, Homo sapiens
  source 1..21: mol_type = genomic RNA
ttcgcgggcgaaggcaaagtc

SEQ ID NO: 663 - RNA, 20 nt, Homo sapiens
  source 1..20: mol_type = genomic RNA
tagaggaagctgtggagaga

SEQ ID NO: 664 - RNA, 22 nt, Homo sapiens
  source 1..22: mol_type = genomic RNA
catctggcatccgtcacacaga

SEQ ID NO: 665 - RNA, 22 nt, Homo sapiens
  source 1..22: mol_type = genomic RNA
tgagggacagatgccagaagca

SEQ ID NO: 666 - RNA, 22 nt, Homo sapiens
  source 1..22: mol_type = genomic RNA
tccccttctgcaggcctgctgg

SEQ ID NO: 667 - RNA, 23 nt, Homo sapiens
  source 1..23: mol_type = genomic RNA
atcagggcttgtggaatgggaag

SEQ ID NO: 668 - RNA, 23 nt, Homo sapiens
  source 1..23: mol_type = genomic RNA
tctggcaagtaaaaaactctcat

SEQ ID NO: 669 - RNA, 22 nt, Homo sapiens
  source 1..22: mol_type = genomic RNA
aaactaatctctacactgctgc

SEQ ID NO: 670 - RNA, 22 nt, Homo sapiens
  source 1..22: mol_type = genomic RNA
gcagtagtgtagagattggttt

SEQ ID NO: 671 - RNA, 21 nt, Homo sapiens
  source 1..21: mol_type = genomic RNA
gctgcaccggagactgggtaa

SEQ ID NO: 672 - RNA, 21 nt, Homo sapiens
  source 1..21: mol_type = genomic RNA
tacccagtctccggtgcagcc

SEQ ID NO: 673 - RNA, 23 nt, Homo sapiens
  source 1..23: mol_type = genomic RNA
tcgaggactggtggaagggcctt

SEQ ID NO: 674 - RNA, 24 nt, Homo sapiens
  source 1..24: mol_type = genomic RNA
tgggtagagaaggagctcagagga

SEQ ID NO: 675 - RNA, 22 nt, Homo sapiens
  source 1..22: mol_type = genomic RNA
taaagaactcttaaaacccaat

SEQ ID NO: 676 - RNA, 23 nt, Homo sapiens
  source 1..23: mol_type = genomic RNA
tgatggataaaagactacatatt

SEQ ID NO: 677 - RNA, 22 nt, Homo sapiens
  source 1..22: mol_type = genomic RNA
tgcctaggctgagactgcagtg

SEQ ID NO: 678 - RNA, 22 nt, Homo sapiens
  source 1..22: mol_type = genomic RNA
ggctggagcgagtgcagtggtg

SEQ ID NO: 679 - RNA, 22 nt, Homo sapiens
  source 1..22: mol_type = genomic RNA
tggcccaacctattcagttagt

SEQ ID NO: 680 - RNA, 23 nt, Homo sapiens
  source 1..23: mol_type = genomic RNA
ctgactgaataggtagggtcatt

SEQ ID NO: 681 - RNA, 24 nt, Homo sapiens
  source 1..24: mol_type = genomic RNA
tctgtagcctgggagcaatggggt

SEQ ID NO: 682 - RNA, 24 nt, Homo sapiens
  source 1..24: mol_type = genomic RNA
tgtggacagtgaggtagagggagt

SEQ ID NO: 683 - RNA, 23 nt, Homo sapiens
  source 1..23: mol_type = genomic RNA
taggagctcaacagatgcctgtt

SEQ ID NO: 684 - RNA, 22 nt, Homo sapiens
  source 1..22: mol_type = genomic RNA
tgctatgccaacatattgccat

SEQ ID NO: 685 - RNA, 22 nt, Homo sapiens
  source 1..22: mol_type = genomic RNA
agcttttgggaattcaggtagt

SEQ ID NO: 686 - RNA, 21 nt, Homo sapiens
  source 1..21: mol_type = genomic RNA
acctgaattaccaaaagcttt

SEQ ID NO: 687 - RNA, 19 nt, Homo sapiens
  source 1..19: mol_type = genomic RNA
gagggcgggtggaggagga

SEQ ID NO: 688 - RNA, 22 nt, Homo sapiens
  source 1..22: mol_type = genomic RNA
aaggcctttctgaaccttcaga

SEQ ID NO: 689 - RNA, 25 nt, Homo sapiens
  source 1..25: mol_type = genomic RNA
ataacattgtaaagcgcttctttcg

SEQ ID NO: 690 - RNA, 22 nt, Homo sapiens
  source 1..22: mol_type = genomic RNA
atatacctgttcggtctcttta

SEQ ID NO: 691 - RNA, 22 nt, Homo sapiens
  source 1..22: mol_type = genomic RNA
aggggaccaaagagatatatag

SEQ ID NO: 692 - RNA, 24 nt, Homo sapiens
  source 1..24: mol_type = genomic RNA
agatattttgagtgtttggaattg

SEQ ID NO: 693 - RNA, 22 nt, Homo sapiens
  source 1..22: mol_type = genomic RNA
aactccaaacactcaaaactca

SEQ ID NO: 694 - RNA, 22 nt, Homo sapiens
  source 1..22: mol_type = genomic RNA
catgctaggatagaaagaatgg

SEQ ID NO: 695 - RNA, 24 nt, Homo sapiens
  source 1..24: mol_type = genomic RNA
ggttgggcagtgaggagggtgtga

SEQ ID NO: 696 - RNA, 22 nt, Homo sapiens
  source 1..22: mol_type = genomic RNA
tggaaaaaactggtgtgtgctt

SEQ ID NO: 697 - RNA, 23 nt, Homo sapiens
  source 1..23: mol_type = genomic RNA
tttgtatggatatgtgtgtgtat

SEQ ID NO: 698 - RNA, 22 nt, Homo sapiens
  source 1..22: mol_type = genomic RNA
ctggggagatcctcgaggttgg

SEQ ID NO: 699 - RNA, 22 nt, Homo sapiens
  source 1..22: mol_type = genomic RNA
caacctcgacgatctcctcagc

SEQ ID NO: 700 - RNA, 21 nt, Homo sapiens
  source 1..21: mol_type = genomic RNA
tgaggagatcgtcgaggttgg

SEQ ID NO: 701 - RNA, 22 nt, Homo sapiens
  source 1..22: mol_type = genomic RNA
caacctcgaggatctccccagc

SEQ ID NO: 702 - RNA, 21 nt, Homo sapiens
  source 1..21: mol_type = genomic RNA
ggtggggcaatgggatcaggt

SEQ ID NO: 703 - RNA, 22 nt, Homo sapiens
  source 1..22: mol_type = genomic RNA
tgtgttagaataggggcaataa

SEQ ID NO: 704 - RNA, 22 nt, Homo sapiens
  source 1..22: mol_type = genomic RNA
attgcctctgttctaacacaag

SEQ ID NO: 705 - RNA, 23 nt, Homo sapiens
  source 1..23: mol_type = genomic RNA
ggggaaagcgagtagggacattt

SEQ ID NO: 706 - RNA, 22 nt, Homo sapiens
  source 1..22: mol_type = genomic RNA
cagaaggggagttgggagcaga

SEQ ID NO: 707 - RNA, 21 nt, Homo sapiens
  source 1..21: mol_type = genomic RNA
ccaggctctgcagtgggaact

SEQ ID NO: 708 - RNA, 18 nt, Homo sapiens
  source 1..18: mol_type = genomic RNA
ccaggctctgcagtggga

SEQ ID NO: 709 - RNA, 21 nt, Homo sapiens
  source 1..21: mol_type = genomic RNA
ctcccacttccagatctttct

SEQ ID NO: 710 - RNA, 22 nt, Homo sapiens
  source 1..22: mol_type = genomic RNA
aaagatctggaagtgggagaca

SEQ ID NO: 711 - RNA, 22 nt, Homo sapiens
  source 1..22: mol_type = genomic RNA
ctgccctagtctagctgaagct

SEQ ID NO: 712 - RNA, 22 nt, Homo sapiens
  source 1..22: mol_type = genomic RNA
ttcagccaggctagtgcagtct

SEQ ID NO: 713 - RNA, 22 nt, Homo sapiens
  source 1..22: mol_type = genomic RNA
aagggcttcctctctgcaggac

SEQ ID NO: 714 - RNA, 21 nt, Homo sapiens
  source 1..21: mol_type = genomic RNA
cctgcagagaggaagcccttc

SEQ ID NO: 715 - RNA, 22 nt, Homo sapiens
  source 1..22: mol_type = genomic RNA
taggattacaagtgtcggccac

SEQ ID NO: 716 - RNA, 21 nt, Homo sapiens
  source 1..21: mol_type = genomic RNA
aggcaagatgctggcatagct

SEQ ID NO: 717 - RNA, 22 nt, Homo sapiens
  source 1..22: mol_type = genomic RNA
agagctgagactagaaagccca

SEQ ID NO: 718 - RNA, 22 nt, Homo sapiens
  source 1..22: mol_type = genomic RNA
ggctttctagtctcagctctcc

SEQ ID NO: 719 - RNA, 23 nt, Homo sapiens
  source 1..23: mol_type = genomic RNA
ctgataagaacagaggcccagat

SEQ ID NO: 720 - RNA, 21 nt, Homo sapiens
  source 1..21: mol_type = genomic RNA
tccctacccctccactcccca

SEQ ID NO: 721 - RNA, 23 nt, Homo sapiens
  source 1..23: mol_type = genomic RNA
ttagggagtagaagggtggggag

SEQ ID NO: 722 - RNA, 22 nt, Homo sapiens
  source 1..22: mol_type = genomic RNA
tataaaatgagggcagtaagac

SEQ ID NO: 723 - RNA, 22 nt, Homo sapiens
  source 1..22: mol_type = genomic RNA
tgtgactttaagggaaatggcg

SEQ ID NO: 724 - RNA, 22 nt, Homo sapiens
  source 1..22: mol_type = genomic RNA
aggtggatgcaatgtgacctca

SEQ ID NO: 725 - RNA, 23 nt, Homo sapiens
  source 1..23: mol_type = genomic RNA
cgcagacaatgcctactggccta

SEQ ID NO: 726 - RNA, 22 nt, Homo sapiens
  source 1..22: mol_type = genomic RNA
aggatttcagaaatactggtgt

SEQ ID NO: 727 - RNA, 17 nt, Homo sapiens
  source 1..17: mol_type = genomic RNA
gagttctacagtcagac

SEQ ID NO: 728 - RNA, 22 nt, Homo sapiens
  source 1..22: mol_type = genomic RNA
taggactgtgcttggcacatag

SEQ ID NO: 729 - RNA, 22 nt, Homo sapiens
  source 1..22: mol_type = genomic RNA
ctggggttctgagacagacagt

SEQ ID NO: 730 - RNA, 24 nt, Homo sapiens
  source 1..24: mol_type = genomic RNA
agatgtatggaatctgtatatatc

SEQ ID NO: 731 - RNA, 22 nt, Homo sapiens
  source 1..22: mol_type = genomic RNA
aaaggaggaaataggcaggcca

SEQ ID NO: 732 - RNA, 22 nt, Homo sapiens
  source 1..22: mol_type = genomic RNA
tgccctgcctgttttctccttt

SEQ ID NO: 733 - RNA, 23 nt, Homo sapiens
  source 1..23: mol_type = genomic RNA
tagtgagttagagatgcagagcc

SEQ ID NO: 734 - RNA, 22 nt, Homo sapiens
  source 1..22: mol_type = genomic RNA
cggggagagaacgcagtgacgt

SEQ ID NO: 735 - RNA, 19 nt, Homo sapiens
  source 1..19: mol_type = genomic RNA
actggcctgggactaccgg

SEQ ID NO: 736 - RNA, 21 nt, Homo sapiens
  source 1..21: mol_type = genomic RNA
tgcacggcactggggacacgt

SEQ ID NO: 737 - RNA, 23 nt, Homo sapiens
  source 1..23: mol_type = genomic RNA
tgtgtacacacgtgccaggcgct

SEQ ID NO: 738 - RNA, 17 nt, Homo sapiens
  source 1..17: mol_type = genomic RNA
ggggcgcggccggatcg

SEQ ID NO: 739 - RNA, 22 nt, Homo sapiens
  source 1..22: mol_type = genomic RNA
agaaggggtgaaatttaaacgt

SEQ ID NO: 740 - RNA, 19 nt, Homo sapiens
  source 1..19: mol_type = genomic RNA
tggggcggagcttccggag

SEQ ID NO: 741 - RNA, 22 nt, Homo sapiens
  source 1..22: mol_type = genomic RNA
tggggcggagcttccggaggcc

SEQ ID NO: 742 - RNA, 25 nt, Homo sapiens
  source 1..25: mol_type = genomic RNA
cttccagacgctccgccccacgtcg

SEQ ID NO: 743 - RNA, 19 nt, Homo sapiens
  source 1..19: mol_type = genomic RNA
atcgggccctcggcgccgg

SEQ ID NO: 744 - RNA, 17 nt, Homo sapiens
  source 1..17: mol_type = genomic RNA
gcttctgtagtgtagtc

SEQ ID NO: 745 - RNA, 22 nt, Homo sapiens
  source 1..22: mol_type = genomic RNA
gcctctctcggagtcgctcgga

SEQ ID NO: 746 - RNA, 23 nt, Homo sapiens
  source 1..23: mol_type = genomic RNA
aaagtctcgctctctgcccctca

SEQ ID NO: 747 - RNA, 24 nt, Homo sapiens
  source 1..24: mol_type = genomic RNA
tgaggggcctcagaccgagctttt

SEQ ID NO: 748 - RNA, 23 nt, Homo sapiens
  source 1..23: mol_type = genomic RNA
agaagaaggcggtcggtctgcgg

SEQ ID NO: 749 - RNA, 21 nt, Homo sapiens
  source 1..21: mol_type = genomic RNA
tcacgcggagagatggctttg

SEQ ID NO: 750 - RNA, 22 nt, Homo sapiens
  source 1..22: mol_type = genomic RNA
caggcgtctgtctacgtggctt

SEQ ID NO: 751 - RNA, 20 nt, Homo sapiens
  source 1..20: mol_type = genomic RNA
ttggccatggggctgcgcgg

SEQ ID NO: 752 - RNA, 23 nt, Homo sapiens
  source 1..23: mol_type = genomic RNA
cctgggcagcgtgtggctgaagg

SEQ ID NO: 753 - RNA, 23 nt, Homo sapiens
  source 1..23: mol_type = genomic RNA
agaggctttgtgcggatacgggg

SEQ ID NO: 754 - RNA, 21 nt, Homo sapiens
  source 1..21: mol_type = genomic RNA
cccttgggtctgatggggtag

SEQ ID NO: 755 - RNA, 25 nt, Homo sapiens
  source 1..25: mol_type = genomic RNA
tgccccatctgtgccctgggtagga

SEQ ID NO: 756 - RNA, 23 nt, Homo sapiens
  source 1..23: mol_type = genomic RNA
tgtggaaggtagacggccagaga

SEQ ID NO: 757 - RNA, 20 nt, Homo sapiens
  source 1..20: mol_type = genomic RNA
tctggccagctacgtcccca

SEQ ID NO: 758 - RNA, 23 nt, Homo sapiens
  source 1..23: mol_type = genomic RNA
tggggacgtagctggccagacag

SEQ ID NO: 759 - RNA, 22 nt, Homo sapiens
  source 1..22: mol_type = genomic RNA
ctctctggccgtctaccttcca

SEQ ID NO: 760 - RNA, 23 nt, Homo sapiens
  source 1..23: mol_type = genomic RNA
tctgggaggttgtagcagtggaa

SEQ ID NO: 761 - RNA, 22 nt, Homo sapiens
  source 1..22: mol_type = genomic RNA
tcctgcgtaggatctgaggagt

SEQ ID NO: 762 - RNA, 22 nt, Homo sapiens
  source 1..22: mol_type = genomic RNA
agctctgctgctcactggcagt

SEQ ID NO: 763 - RNA, 21 nt, Homo sapiens
  source 1..21: mol_type = genomic RNA
ggccagccaccaggagggctg

SEQ ID NO: 764 - RNA, 17 nt, Homo sapiens
  source 1..17: mol_type = genomic RNA
cgcgccgggcccgggtt

SEQ ID NO: 765 - RNA, 18 nt, Homo sapiens
  source 1..18: mol_type = genomic RNA
cggggcggcaggggcctc

SEQ ID NO: 766 - RNA, 23 nt, Homo sapiens
  source 1..23: mol_type = genomic RNA
ggaggcgcaggctcggaaaggcg

SEQ ID NO: 767 - RNA, 22 nt, Homo sapiens
  source 1..22: mol_type = genomic RNA
gtggagtcctggggaatggaga

SEQ ID NO: 768 - RNA, 23 nt, Homo sapiens
  source 1..23: mol_type = genomic RNA
agggactgccttaggagaaagtt

SEQ ID NO: 769 - RNA, 22 nt, Homo sapiens
  source 1..22: mol_type = genomic RNA
caccttgcgctactcaggtctg

SEQ ID NO: 770 - RNA, 22 nt, Homo sapiens
  source 1..22: mol_type = genomic RNA
aatctgagaaggcgcacaaggt

SEQ ID NO: 771 - RNA, 17 nt, Homo sapiens
  source 1..17: mol_type = genomic RNA
gggatatgaagaaaaat

SEQ ID NO: 772 - RNA, 22 nt, Homo sapiens
  source 1..22: mol_type = genomic RNA
tggaagggagaagagctttaat

SEQ ID NO: 773 - RNA, 22 nt, Homo sapiens
  source 1..22: mol_type = genomic RNA
aaaagctgggttgagagggcga

SEQ ID NO: 774 - RNA, 22 nt, Homo sapiens
  source 1..22: mol_type = genomic RNA
aaaagctgggttgagagggcaa

SEQ ID NO: 775 - RNA, 20 nt, Homo sapiens
  source 1..20: mol_type = genomic RNA
aaaagctgggttgagagggt

SEQ ID NO: 776 - RNA, 19 nt, Homo sapiens
  source 1..19: mol_type = genomic RNA
aaaagctgggttgagagga

SEQ ID NO: 777 - RNA, 18 nt, Homo sapiens
  source 1..18: mol_type = genomic RNA
aaagctgggttgagaagg

SEQ ID NO: 778 - RNA, 21 nt, Homo sapiens
  source 1..21: mol_type = genomic RNA
cacattacacggtcgacctct

SEQ ID NO: 779 - RNA, 22 nt, Homo sapiens
  source 1..22: mol_type = genomic RNA
aggtggtccgtggcgcgttcgc

SEQ ID NO: 780 - RNA, 22 nt, Homo sapiens
  source 1..22: mol_type = genomic RNA
cccaatacacggtcgacctctt

SEQ ID NO: 781 - RNA, 23 nt, Homo sapiens
  source 1..23: mol_type = genomic RNA
aggttgtccgtggtgagttcgca

SEQ ID NO: 782 - RNA, 22 nt, Homo sapiens
  source 1..22: mol_type = genomic RNA
caatttagtgtgtgtgatattt

SEQ ID NO: 783 - RNA, 20 nt, Homo sapiens
  source 1..20: mol_type = genomic RNA
actgccccaggtgctgctgg

SEQ ID NO: 784 - RNA, 23 nt, Homo sapiens
  source 1..23: mol_type = genomic RNA
cgcatcccctagggcattggtgt

SEQ ID NO: 785 - RNA, 23 nt, Homo sapiens
  source 1..23: mol_type = genomic RNA
cctagtaggtgtccagtaagtgt

SEQ ID NO: 786 - RNA, 22 nt, Homo sapiens
  source 1..22: mol_type = genomic RNA
tattgcacattactaagttgca

SEQ ID NO: 787 - RNA, 20 nt, Homo sapiens
  source 1..20: mol_type = genomic RNA
cctctgggcccttcctccag

SEQ ID NO: 788 - RNA, 22 nt, Homo sapiens
  source 1..22: mol_type = genomic RNA
ctggccctctctgcccttccgt

SEQ ID NO: 789 - RNA, 22 nt, Homo sapiens
  source 1..22: mol_type = genomic RNA
aacacacctggttaacctcttt

SEQ ID NO: 790 - RNA, 23 nt, Homo sapiens
  source 1..23: mol_type = genomic RNA
gcaaagcacacggcctgcagaga

SEQ ID NO: 791 - RNA, 22 nt, Homo sapiens
  source 1..22: mol_type = genomic RNA
tctctgggcctgtgtcttaggc

SEQ ID NO: 792 - RNA, 21 nt, Homo sapiens
  source 1..21: mol_type = genomic RNA
gcccctgggcctatcctagaa

SEQ ID NO: 793 - RNA, 22 nt, Homo sapiens
  source 1..22: mol_type = genomic RNA
ctaggtatggtcccagggatcc

SEQ ID NO: 794 - RNA, 22 nt, Homo sapiens
  source 1..22: mol_type = genomic RNA
tttttcattattgctcctgacc

SEQ ID NO: 795 - RNA, 23 nt, Homo sapiens
  source 1..23: mol_type = genomic RNA
tcaagagcaataacgaaaaatgt

SEQ ID NO: 796 - RNA, 22 nt, Homo sapiens
  source 1..22: mol_type = genomic RNA
ctcctatatgatgcctttcttc

SEQ ID NO: 797 - RNA, 21 nt, Homo sapiens
  source 1..21: mol_type = genomic RNA
gaacggcttcatacaggagtt

SEQ ID NO: 798 - RNA, 22 nt, Homo sapiens
  source 1..22: mol_type = genomic RNA
tccagcatcagtgattttgttg

SEQ ID NO: 799 - RNA, 22 nt, Homo sapiens
  source 1..22: mol_type = genomic RNA
aacaatatcctggtgctgagtg

SEQ ID NO: 800 - RNA, 23 nt, Homo sapiens
  source 1..23: mol_type = genomic RNA
tgagcgcctcgacgacagagccg

SEQ ID NO: 801 - RNA, 23 nt, Homo sapiens
  source 1..23: mol_type = genomic RNA
tccctgtcctccaggagctcacg

SEQ ID NO: 802 - RNA, 22 nt, Homo sapiens
  source 1..22: mol_type = genomic RNA
caatgtttccacagtgcatcac

SEQ ID NO: 803 - RNA, 21 nt, Homo sapiens
  source 1..21: mol_type = genomic RNA
gtgcattgtagttgcattgca

SEQ ID NO: 804 - RNA, 22 nt, Homo sapiens
  source 1..22: mol_type = genomic RNA
cagtgcctcggcagtgcagccc

SEQ ID NO: 805 - RNA, 20 nt, Homo sapiens
  source 1..20: mol_type = genomic RNA
gtgcattgctgttgcattgc

SEQ ID NO: 806 - RNA, 22 nt, Homo sapiens
  source 1..22: mol_type = genomic RNA
tccgtctcagttactttatagc

SEQ ID NO: 807 - RNA, 22 nt, Homo sapiens
  source 1..22: mol_type = genomic RNA
ttataaagcaatgagactgatt

SEQ ID NO: 808 - RNA, 23 nt, Homo sapiens
  source 1..23: mol_type = genomic RNA
tctcacacagaaatcgcacccgt

SEQ ID NO: 809 - RNA, 21 nt, Homo sapiens
  source 1..21: mol_type = genomic RNA
aggggtgctatctgtgattga

SEQ ID NO: 810 - RNA, 22 nt, Homo sapiens
  source 1..22: mol_type = genomic RNA
gccctgaacgaggggtctggag

SEQ ID NO: 811 - RNA, 22 nt, Homo sapiens
  source 1..22: mol_type = genomic RNA
gctgactcctagtccagggctc

SEQ ID NO: 812 - RNA, 23 nt, Homo sapiens
  source 1..23: mol_type = genomic RNA
tgtctgcccgcatgcctgcctct

SEQ ID NO: 813 - RNA, 22 nt, Homo sapiens
  source 1..22: mol_type = genomic RNA
caatcagcaagtatactgccct

SEQ ID NO: 814 - RNA, 22 nt, Homo sapiens
  source 1..22: mol_type = genomic RNA
tggcagtgtcttagctggttgt

SEQ ID NO: 815 - RNA, 22 nt, Homo sapiens
  source 1..22: mol_type = genomic RNA
caatcactaactccactgccat

SEQ ID NO: 816 - RNA, 23 nt, Homo sapiens
  source 1..23: mol_type = genomic RNA
taggcagtgtcattagctgattg

SEQ ID NO: 817 - RNA, 22 nt, Homo sapiens
  source 1..22: mol_type = genomic RNA
aatcactaaccacacggccagg

SEQ ID NO: 818 - RNA, 23 nt, Homo sapiens
  source 1..23: mol_type = genomic RNA
aggcagtgtagttagctgattgc

SEQ ID NO: 819 - RNA, 24 nt, Homo sapiens
  source 1..24: mol_type = genomic RNA
aacaacaaaatcactagtcttcca

SEQ ID NO: 820 - RNA, 22 nt, Homo sapiens
  source 1..22: mol_type = genomic RNA
aggtagactgggatttgttgtt

SEQ ID NO: 821 - RNA, 22 nt, Homo sapiens
  source 1..22: mol_type = genomic RNA
aaacaccattgtcacactccac

SEQ ID NO: 822 - RNA, 23 nt, Homo sapiens
  source 1..23: mol_type = genomic RNA
tttagtgtgataatggcgtttga

SEQ ID NO: 823 - RNA, 23 nt, Homo sapiens
  source 1..23: mol_type = genomic RNA
cctccgtgttacctgtcctctag

SEQ ID NO: 824 - RNA, 23 nt, Homo sapiens
  source 1..23: mol_type = genomic RNA
tgaggatggatagcaaggaagcc

SEQ ID NO: 825 - RNA, 21 nt, Homo sapiens
  source 1..21: mol_type = genomic RNA
aaaatttctttcactacttag

SEQ ID NO: 826 - RNA, 21 nt, Homo sapiens
  source 1..21: mol_type = genomic RNA
ttagtgaaggctattttaatt

SEQ ID NO: 827 - RNA, 20 nt, Homo sapiens
  source 1..20: mol_type = genomic RNA
actgtaaacgctttctgatg

SEQ ID NO: 828 - RNA, 22 nt, Homo sapiens
  source 1..22: mol_type = genomic RNA
gcatgtgatgaagcaaatcagt

SEQ ID NO: 829 - RNA, 24 nt, Homo sapiens
  source 1..24: mol_type = genomic RNA
caaagtgatgagtaatactggctg

SEQ ID NO: 830 - RNA, 20 nt, Homo sapiens
  source 1..20: mol_type = genomic RNA
gaatcggaaaggaggcgccg

SEQ ID NO: 831 - RNA, 21 nt, Homo sapiens
  source 1..21: mol_type = genomic RNA
ttgtgaagaaagaaattctta

SEQ ID NO: 832 - RNA, 22 nt, Homo sapiens
  source 1..22: mol_type = genomic RNA
aggaggcatcttgagaaatgga

SEQ ID NO: 833 - RNA, 24 nt, Homo sapiens
  source 1..24: mol_type = genomic RNA
acaaaaaaaaaagcccaacccttc

SEQ ID NO: 834 - RNA, 22 nt, Homo sapiens
  source 1..22: mol_type = genomic RNA
tgttgtacttttttttttgttc

SEQ ID NO: 835 - RNA, 23 nt, Homo sapiens
  source 1..23: mol_type = genomic RNA
tcccccaggtgtgattctgattt

SEQ ID NO: 836 - RNA, 23 nt, Homo sapiens
  source 1..23: mol_type = genomic RNA
tagccttcagatcttggtgtttt

SEQ ID NO: 837 - RNA, 23 nt, Homo sapiens
  source 1..23: mol_type = genomic RNA
ccacttggatctgaaggctgccc

SEQ ID NO: 838 - RNA, 21 nt, Homo sapiens
  source 1..21: mol_type = genomic RNA
tctctcggctcctcgcggctc

SEQ ID NO: 839 - RNA, 22 nt, Homo sapiens
  source 1..22: mol_type = genomic RNA
ttatcagaatctccaggggtac

SEQ ID NO: 840 - RNA, 23 nt, Homo sapiens
  source 1..23: mol_type = genomic RNA
cgagggcatttcatgatgcaggc

SEQ ID NO: 841 - RNA, 22 nt, Homo sapiens
  source 1..22: mol_type = genomic RNA
atgaagtgcactcatgatatgt

SEQ ID NO: 842 - RNA, 23 nt, Homo sapiens
  source 1..23: mol_type = genomic RNA
catcagcaccctatgtcctttct

SEQ ID NO: 843 - RNA, 22 nt, Homo sapiens
  source 1..22: mol_type = genomic RNA
aaagacatagttgcaagatggg

SEQ ID NO: 844 - RNA, 22 nt, Homo sapiens
  source 1..22: mol_type = genomic RNA
tgtctacattaatgaaaagagc

SEQ ID NO: 845 - RNA, 22 nt, Homo sapiens
  source 1..22: mol_type = genomic RNA
gggaccatcctgcctgctgtgg

SEQ ID NO: 846 - RNA, 22 nt, Homo sapiens
  source 1..22: mol_type = genomic RNA
tcagcaggcaggctggtgcagc

SEQ ID NO: 847 - RNA, 22 nt, Homo sapiens
  source 1..22: mol_type = genomic RNA
tcaccctgcatcccgcacccag

SEQ ID NO: 848 - RNA, 22 nt, Homo sapiens
  source 1..22: mol_type = genomic RNA
gtgggctgggctgggctgggcc

SEQ ID NO: 849 - RNA, 20 nt, Homo sapiens
  source 1..20: mol_type = genomic RNA
cgcgggtcggggtctgcagg

SEQ ID NO: 850 - RNA, 22 nt, Homo sapiens
  source 1..22: mol_type = genomic RNA
tcacctgacctcccatgcctgt

SEQ ID NO: 851 - RNA, 22 nt, Homo sapiens
  source 1..22: mol_type = genomic RNA
caggcacgggagctcaggtgag

SEQ ID NO: 852 - RNA, 21 nt, Homo sapiens
  source 1..21: mol_type = genomic RNA
tcacctgagctcccgtgcctg

SEQ ID NO: 853 - RNA, 20 nt, Homo sapiens
  source 1..20: mol_type = genomic RNA
aggcatgggaggtcaggtga

SEQ ID NO: 854 - RNA, 22 nt, Homo sapiens
  source 1..22: mol_type = genomic RNA
aacacacctattcaaggattca

SEQ ID NO: 855 - RNA, 24 nt, Homo sapiens
  source 1..24: mol_type = genomic RNA
aatccttggaacctaggtgtgagt

SEQ ID NO: 856 - RNA, 22 nt, Homo sapiens
  source 1..22: mol_type = genomic RNA
aattgcacggtatccatctgta

SEQ ID NO: 857 - RNA, 22 nt, Homo sapiens
  source 1..22: mol_type = genomic RNA
cgggtggatcacgatgcaattt

SEQ ID NO: 858 - RNA, 22 nt, Homo sapiens
  source 1..22: mol_type = genomic RNA
aaaatgaaatgagcccagccca

SEQ ID NO: 859 - RNA, 21 nt, Homo sapiens
  source 1..21: mol_type = genomic RNA
agccgcggggatcgccgaggg

SEQ ID NO: 860 - RNA, 19 nt, Homo sapiens
  source 1..19: mol_type = genomic RNA
agggacctgagtgtctaag

SEQ ID NO: 861 - RNA, 19 nt, Homo sapiens
  source 1..19: mol_type = genomic RNA
aggtgtgtctgtagagtcc

SEQ ID NO: 862 - RNA, 24 nt, Homo sapiens
  source 1..24: mol_type = genomic RNA
catagcccggtcgctggtacatga

SEQ ID NO: 863 - RNA, 18 nt, Homo sapiens
  source 1..18: mol_type = genomic RNA
cggctggaggtgtgagga

SEQ ID NO: 864 - RNA, 18 nt, Homo sapiens
  source 1..18: mol_type = genomic RNA
ctaagaagttgactgaag

SEQ ID NO: 865 - RNA, 19 nt, Homo sapiens
  source 1..19: mol_type = genomic RNA
gactggacaagctgaggaa

SEQ ID NO: 866 - RNA, 21 nt, Homo sapiens
  source 1..21: mol_type = genomic RNA
gcttgtcgctgcggtgttgct

SEQ ID NO: 867 - RNA, 17 nt, Homo sapiens
  source 1..17: mol_type = genomic RNA
ggcgggtgcgggggtgg

SEQ ID NO: 868 - RNA, 21 nt, Homo sapiens
  source 1..21: mol_type = genomic RNA
tgtgtcccattattggtgatt

SEQ ID NO: 869 - RNA, 22 nt, Homo sapiens
  source 1..22: mol_type = genomic RNA
tttaagaaaacaccatggagat

SEQ ID NO: 870 - RNA, 21 nt, Homo sapiens
  source 1..21: mol_type = genomic RNA
tgagtgttgtctacgagggca

SEQ ID NO: 871 - RNA, 22 nt, Homo sapiens
  source 1..22: mol_type = genomic RNA
taatgcccctaaaaatccttat

SEQ ID NO: 872 - RNA, 23 nt, Homo sapiens
  source 1..23: mol_type = genomic RNA
agggacttttgggggcagatgtg

SEQ ID NO: 873 - RNA, 22 nt, Homo sapiens
  source 1..22: mol_type = genomic RNA
taatgcccctaaaaatccttat

SEQ ID NO: 874 - RNA, 22 nt, Homo sapiens
  source 1..22: mol_type = genomic RNA
agggactttcaggggcagctgt

SEQ ID NO: 875 - RNA, 21 nt, Homo sapiens
  source 1..21: mol_type = genomic RNA
actgacaggagagcattttga

SEQ ID NO: 876 - RNA, 22 nt, Homo sapiens
  source 1..22: mol_type = genomic RNA
tgacctgggactcggacagctg

SEQ ID NO: 877 - RNA, 24 nt, Homo sapiens
  source 1..24: mol_type = genomic RNA
gaaaatgatgagtagtgactgatg

SEQ ID NO: 878 - RNA, 23 nt, Homo sapiens
  source 1..23: mol_type = genomic RNA
tgagcaccacacaggccgggcgc

SEQ ID NO: 879 - RNA, 21 nt, Homo sapiens
  source 1..21: mol_type = genomic RNA
gctggtctgcgtggtgctcgg

SEQ ID NO: 880 - RNA, 22 nt, Homo sapiens
  source 1..22: mol_type = genomic RNA
tctcaggagtaaagacagagtt

SEQ ID NO: 881 - RNA, 22 nt, Homo sapiens
  source 1..22: mol_type = genomic RNA
aactctgtcttcactcatgagt

SEQ ID NO: 882 - RNA, 18 nt, Homo sapiens
  source 1..18: mol_type = genomic RNA
agcaggtgcggggcggcg

SEQ ID NO: 883 - RNA, 21 nt, Homo sapiens
  source 1..21: mol_type = genomic RNA
cagtgcaagtgtagatgccga

SEQ ID NO: 884 - RNA, 22 nt, Homo sapiens
  source 1..22: mol_type = genomic RNA
accttcctctccatgggtcttt

SEQ ID NO: 885 - RNA, 22 nt, Homo sapiens
  source 1..22: mol_type = genomic RNA
aaagacccattgaggagaaggt

SEQ ID NO: 886 - RNA, 21 nt, Homo sapiens
  source 1..21: mol_type = genomic RNA
aatgtagagattgatcaaaat

SEQ ID NO: 887 - RNA, 23 nt, Homo sapiens
  source 1..23: mol_type = genomic RNA
acggaatatgtatacggaatata

SEQ ID NO: 888 - RNA, 24 nt, Homo sapiens
  source 1..24: mol_type = genomic RNA
agagctcacagctgtccttctcta

SEQ ID NO: 889 - RNA, 22 nt, Homo sapiens
  source 1..22: mol_type = genomic RNA
atcaaataaggactagtctgca

SEQ ID NO: 890 - RNA, 23 nt, Homo sapiens
  source 1..23: mol_type = genomic RNA
atgagactcatgtaaaacatctt

SEQ ID NO: 891 - RNA, 21 nt, Homo sapiens
  source 1..21: mol_type = genomic RNA
atggaatgtatatacggaata

SEQ ID NO: 892 - RNA, 22 nt, Homo sapiens
  source 1..22: mol_type = genomic RNA
aattgcactttagcaatggtga

SEQ ID NO: 893 - RNA, 22 nt, Homo sapiens
  source 1..22: mol_type = genomic RNA
attgtagaacctaagattggcc

SEQ ID NO: 894 - RNA, 22 nt, Homo sapiens
  source 1..22: mol_type = genomic RNA
catctctaaggaactcccccaa

SEQ ID NO: 895 - RNA, 23 nt, Homo sapiens
  source 1..23: mol_type = genomic RNA
tatggggcttctgtagagatttc

SEQ ID NO: 896 - RNA, 22 nt, Homo sapiens
  source 1..22: mol_type = genomic RNA
actgttgctaatatgcaactct

SEQ ID NO: 897 - RNA, 20 nt, Homo sapiens
  source 1..20: mol_type = genomic RNA
ccgtgtttcccccacgcttt

SEQ ID NO: 898 - RNA, 15 nt, Homo sapiens
  source 1..15: mol_type = genomic RNA
aggagatcctgggtt

SEQ ID NO: 899 - RNA, 22 nt, Homo sapiens
  source 1..22: mol_type = genomic RNA
ctcgtgggctctggccacggcc

SEQ ID NO: 900 - RNA, 22 nt, Homo sapiens
  source 1..22: mol_type = genomic RNA
cagtggccagagccctgcagtg

SEQ ID NO: 901 - RNA, 22 nt, Homo sapiens
  source 1..22: mol_type = genomic RNA
ctgcagagtttgtacggaccgg

SEQ ID NO: 902 - RNA, 20 nt, Homo sapiens
  source 1..20: mol_type = genomic RNA
tccgtacaaactctgctgtg

SEQ ID NO: 903 - RNA, 22 nt, Homo sapiens
  source 1..22: mol_type = genomic RNA
cttccccccagtaatcttcatc

SEQ ID NO: 904 - RNA, 23 nt, Homo sapiens
  source 1..23: mol_type = genomic RNA
tgaggatatggcagggaagggga

SEQ ID NO: 905 - RNA, 23 nt, Homo sapiens
  source 1..23: mol_type = genomic RNA
ttttgcatgaccctgggagtagg

SEQ ID NO: 906 - RNA, 22 nt, Homo sapiens
  source 1..22: mol_type = genomic RNA
gactcactcacaggattgtgca

SEQ ID NO: 907 - RNA, 22 nt, Homo sapiens
  source 1..22: mol_type = genomic RNA
acacagtgcttcatccactact

SEQ ID NO: 908 - RNA, 22 nt, Homo sapiens
  source 1..22: mol_type = genomic RNA
tagtggatgatgcactctgtgc

SEQ ID NO: 909 - RNA, 21 nt, Homo sapiens
  source 1..21: mol_type = genomic RNA
tgatgatacaggtggaggtag

SEQ ID NO: 910 - RNA, 22 nt, Homo sapiens
  source 1..22: mol_type = genomic RNA
ctacttctacctgtgttatcat

SEQ ID NO: 911 - RNA, 22 nt, Homo sapiens
  source 1..22: mol_type = genomic RNA
tgcgacattggaagtagtatca

SEQ ID NO: 912 - RNA, 21 nt, Homo sapiens
  source 1..21: mol_type = genomic RNA
ttagacctagtacacgtcctt

SEQ ID NO: 913 - RNA, 22 nt, Homo sapiens
  source 1..22: mol_type = genomic RNA
tttcctaccctacctgaagact

SEQ ID NO: 914 - RNA, 22 nt, Homo sapiens
  source 1..22: mol_type = genomic RNA
atctgtaagagaaagtaaatga

SEQ ID NO: 915 - RNA, 24 nt, Homo sapiens
  source 1..24: mol_type = genomic RNA
cccggacaggcgttcgtgcgacgt

SEQ ID NO: 916 - RNA, 22 nt, Homo sapiens
  source 1..22: mol_type = genomic RNA
tatggaaagactttgccactct

SEQ ID NO: 917 - RNA, 21 nt, Homo sapiens
  source 1..21: mol_type = genomic RNA
agtggcaaagtctttccatat

SEQ ID NO: 918 - RNA, 22 nt, Homo sapiens
  source 1..22: mol_type = genomic RNA
ctgggaggtgtgatatcgtggt

SEQ ID NO: 919 - RNA, 22 nt, Homo sapiens
  source 1..22: mol_type = genomic RNA
tgtgatatcatggttcctggga

SEQ ID NO: 920 - RNA, 22 nt, Homo sapiens
  source 1..22: mol_type = genomic RNA
ctgggaggtgtgatattgtggt

SEQ ID NO: 921 - RNA, 22 nt, Homo sapiens
  source 1..22: mol_type = genomic RNA
tgtgatatcatggttcctggga

SEQ ID NO: 922 - RNA, 22 nt, Homo sapiens
  source 1..22: mol_type = genomic RNA
ctgggaggtgtgatattgtggt

SEQ ID NO: 923 - RNA, 22 nt, Homo sapiens
  source 1..22: mol_type = genomic RNA
gggaggtgtgatctcacactcg

SEQ ID NO: 924 - RNA, 22 nt, Homo sapiens
  source 1..22: mol_type = genomic RNA
tgtgatatcatggttcctggga

SEQ ID NO: 925 - RNA, 22 nt, Homo sapiens
  source 1..22: mol_type = genomic RNA
tgtgatatcgtgcttcctggga

SEQ ID NO: 926 - RNA, 23 nt, Homo sapiens
  source 1..23: mol_type = genomic RNA
acctggacccagcgtagacaaag

SEQ ID NO: 927 - RNA, 22 nt, Homo sapiens
  source 1..22: mol_type = genomic RNA
accaagtctgcgtcatcctctc

SEQ ID NO: 928 - RNA, 23 nt, Homo sapiens
  source 1..23: mol_type = genomic RNA
agtggatgatggagactcggtac

SEQ ID NO: 929 - RNA, 24 nt, Homo sapiens
  source 1..24: mol_type = genomic RNA
gttccacactgacactgcagaagt

SEQ ID NO: 930 - RNA, 24 nt, Homo sapiens
  source 1..24: mol_type = genomic RNA
cctgctggtcaggagtggatactg

SEQ ID NO: 931 - RNA, 21 nt, Homo sapiens
  source 1..21: mol_type = genomic RNA
aataatacatggttgatcttt

SEQ ID NO: 932 - RNA, 22 nt, Homo sapiens
  source 1..22: mol_type = genomic RNA
agatcgaccgtgttatattcgc

SEQ ID NO: 933 - RNA, 22 nt, Homo sapiens
  source 1..22: mol_type = genomic RNA
gcctgctggggtggaacctggt

SEQ ID NO: 934 - RNA, 20 nt, Homo sapiens
  source 1..20: mol_type = genomic RNA
ggtatccgtttggggatggt

SEQ ID NO: 935 - RNA, 22 nt, Homo sapiens
  source 1..22: mol_type = genomic RNA
gaaggcagcagtgctcccctgt

SEQ ID NO: 936 - RNA, 23 nt, Homo sapiens
  source 1..23: mol_type = genomic RNA
aagtgccgccatcttttgagtgt

SEQ ID NO: 937 - RNA, 20 nt, Homo sapiens
  source 1..20: mol_type = genomic RNA
actcaaactgtgggggcact

SEQ ID NO: 938 - RNA, 23 nt, Homo sapiens
  source 1..23: mol_type = genomic RNA
aagtgcccccacagtttgagtgc

SEQ ID NO: 939 - RNA, 22 nt, Homo sapiens
  source 1..22: mol_type = genomic RNA
actcaaaagatggcggcacttt

SEQ ID NO: 940 - RNA, 23 nt, Homo sapiens
  source 1..23: mol_type = genomic RNA
aaagtgctgcgacatttgagcgt

SEQ ID NO: 941 - RNA, 23 nt, Homo sapiens
  source 1..23: mol_type = genomic RNA
gaagtgcttcgattttggggtgt

SEQ ID NO: 942 - RNA, 22 nt, Homo sapiens
  source 1..22: mol_type = genomic RNA
actcaaaatgggggcgctttcc

SEQ ID NO: 943 - RNA, 22 nt, Homo sapiens
  source 1..22: mol_type = genomic RNA
cttatcagattgtattgtaatt

SEQ ID NO: 944 - RNA, 22 nt, Homo sapiens
  source 1..22: mol_type = genomic RNA
ttataatacaacctgataagtg

SEQ ID NO: 945 - RNA, 22 nt, Homo sapiens
  source 1..22: mol_type = genomic RNA
cttagcaggttgtattatcatt

SEQ ID NO: 946 - RNA, 22 nt, Homo sapiens
  source 1..22: mol_type = genomic RNA
atataatacaacctgctaagtg

SEQ ID NO: 947 - RNA, 22 nt, Homo sapiens
  source 1..22: mol_type = genomic RNA
cacttagcaggttgtattatat

SEQ ID NO: 948 - RNA, 22 nt, Homo sapiens
  source 1..22: mol_type = genomic RNA
ataatacaacctgctaagtgct

SEQ ID NO: 949 - RNA, 22 nt, Homo sapiens
  source 1..22: mol_type = genomic RNA
tttgttcgttcggctcgcgtga

SEQ ID NO: 950 - RNA, 21 nt, Homo sapiens
  source 1..21: mol_type = genomic RNA
ggtagattttccttctatggt

SEQ ID NO: 951 - RNA, 21 nt, Homo sapiens
  source 1..21: mol_type = genomic RNA
atcatagaggaaaatccacgt

SEQ ID NO: 952 - RNA, 22 nt, Homo sapiens
  source 1..22: mol_type = genomic RNA
gtagattctccttctatgagta

SEQ ID NO: 953 - RNA, 22 nt, Homo sapiens
  source 1..22: mol_type = genomic RNA
atcatagaggaaaatccatgtt

SEQ ID NO: 954 - RNA, 22 nt, Homo sapiens
  source 1..22: mol_type = genomic RNA
cgtggatattccttctatgttt

SEQ ID NO: 955 - RNA, 21 nt, Homo sapiens
  source 1..21: mol_type = genomic RNA
aacatagaggaaattccacgt

SEQ ID NO: 956 - RNA, 21 nt, Homo sapiens
  source 1..21: mol_type = genomic RNA
ggtggatattccttctatgtt

SEQ ID NO: 957 - RNA, 22 nt, Homo sapiens
  source 1..22: mol_type = genomic RNA
atcacacaaaggcaacttttgt

SEQ ID NO: 958 - RNA, 22 nt, Homo sapiens
  source 1..22: mol_type = genomic RNA
agaggttgcccttggtgaattc

SEQ ID NO: 959 - RNA, 21 nt, Homo sapiens
  source 1..21: mol_type = genomic RNA
actggacttggagtcagaagg

SEQ ID NO: 960 - RNA, 22 nt, Homo sapiens
  source 1..22: mol_type = genomic RNA
ctcctgactccaggtcctgtgt

SEQ ID NO: 961 - RNA, 19 nt, Homo sapiens
  source 1..19: mol_type = genomic RNA
actggacttggaggcagaa

SEQ ID NO: 962 - RNA, 25 nt, Homo sapiens
  source 1..25: mol_type = genomic RNA
actggacttggagtcagaagagtgg

SEQ ID NO: 963 - RNA, 20 nt, Homo sapiens
  source 1..20: mol_type = genomic RNA
actggacttggagtcagaaa

SEQ ID NO: 964 - RNA, 19 nt, Homo sapiens
  source 1..19: mol_type = genomic RNA
actggacttggagtcagga

SEQ ID NO: 965 - RNA, 20 nt, Homo sapiens
  source 1..20: mol_type = genomic RNA
actggacttggagccagaag

SEQ ID NO: 966 - RNA, 20 nt, Homo sapiens
  source 1..20: mol_type = genomic RNA
actgggcttggagtcagaag

SEQ ID NO: 967 - RNA, 21 nt, Homo sapiens
  source 1..21: mol_type = genomic RNA
actggacttggtgtcagatgg

SEQ ID NO: 968 - RNA, 21 nt, Homo sapiens
  source 1..21: mol_type = genomic RNA
actggactaggagtcagaagg

SEQ ID NO: 969 - RNA, 19 nt, Homo sapiens
  source 1..19: mol_type = genomic RNA
actggatttggagccagaa

SEQ ID NO: 970 - RNA, 22 nt, Homo sapiens
  source 1..22: mol_type = genomic RNA
tatgtaacatggtccactaact

SEQ ID NO: 971 - RNA, 21 nt, Homo sapiens
  source 1..21: mol_type = genomic RNA
tggtagactatggaacgtagg

SEQ ID NO: 972 - RNA, 22 nt, Homo sapiens
  source 1..22: mol_type = genomic RNA
tatgtaatatggtccacatctt

SEQ ID NO: 973 - RNA, 22 nt, Homo sapiens
  source 1..22: mol_type = genomic RNA
tggttgaccatagaacatgcgc

SEQ ID NO: 974 - RNA, 22 nt, Homo sapiens
  source 1..22: mol_type = genomic RNA
tatacaagggcaagctctctgt

SEQ ID NO: 975 - RNA, 22 nt, Homo sapiens
  source 1..22: mol_type = genomic RNA
agcgaggttgccctttgtatat

SEQ ID NO: 976 - RNA, 21 nt, Homo sapiens
  source 1..21: mol_type = genomic RNA
aatcattcacggacaacactt

SEQ ID NO: 977 - RNA, 22 nt, Homo sapiens
  source 1..22: mol_type = genomic RNA
gaagttgttcgtggtggattcg

SEQ ID NO: 978 - RNA, 22 nt, Homo sapiens
  source 1..22: mol_type = genomic RNA
agatcagaaggtgattgtggct

SEQ ID NO: 979 - RNA, 20 nt, Homo sapiens
  source 1..20: mol_type = genomic RNA
attcctagaaattgttcata

SEQ ID NO: 980 - RNA, 22 nt, Homo sapiens
  source 1..22: mol_type = genomic RNA
aggtgctccaggctggctcaca

SEQ ID NO: 981 - RNA, 22 nt, Homo sapiens
  source 1..22: mol_type = genomic RNA
gagcaatgtaggtagactgttt

SEQ ID NO: 982 - RNA, 22 nt, Homo sapiens
  source 1..22: mol_type = genomic RNA
tgtcctctagggcctgcagtct

SEQ ID NO: 983 - RNA, 20 nt, Homo sapiens
  source 1..20: mol_type = genomic RNA
aaaggcataaaaccaagaca

SEQ ID NO: 984 - RNA, 22 nt, Homo sapiens
  source 1..22: mol_type = genomic RNA
tgtgtggatcctggaggaggca

SEQ ID NO: 985 - RNA, 21 nt, Homo sapiens
  source 1..21: mol_type = genomic RNA
taacgcataatatggacatgt

SEQ ID NO: 986 - RNA, 22 nt, Homo sapiens
  source 1..22: mol_type = genomic RNA
agacatcaagatcagtcccaaa

SEQ ID NO: 987 - RNA, 22 nt, Homo sapiens
  source 1..22: mol_type = genomic RNA
tttgggactgatcttgatgtct

SEQ ID NO: 988 - RNA, 22 nt, Homo sapiens
  source 1..22: mol_type = genomic RNA
aaggaaccagaaaatgagaagt

SEQ ID NO: 989 - RNA, 22 nt, Homo sapiens
  source 1..22: mol_type = genomic RNA
ttgaggaaaagatggtcttatt

SEQ ID NO: 990 - RNA, 26 nt, Homo sapiens
  source 1..26: mol_type = genomic RNA
aagaggaagaaatggctggttctcag

SEQ ID NO: 991 - RNA, 20 nt, Homo sapiens
  source 1..20: mol_type = genomic RNA
gctcggactgagcaggtggg

SEQ ID NO: 992 - RNA, 21 nt, Homo sapiens
  source 1..21: mol_type = genomic RNA
acagggccgcagatggagact

SEQ ID NO: 993 - RNA, 21 nt, Homo sapiens
  source 1..21: mol_type = genomic RNA
gcagagaacaaaggactcagt

SEQ ID NO: 994 - RNA, 22 nt, Homo sapiens
  source 1..22: mol_type = genomic RNA
actgattatcttaactctctga

SEQ ID NO: 995 - RNA, 23 nt, Homo sapiens
  source 1..23: mol_type = genomic RNA
tctctgagtaccatatgccttgt

SEQ ID NO: 996 - RNA, 22 nt, Homo sapiens
  source 1..22: mol_type = genomic RNA
tctggccttgacttgactcttt

SEQ ID NO: 997 - RNA, 23 nt, Homo sapiens
  source 1..23: mol_type = genomic RNA
tcaaggccagaggtcccacagca

SEQ ID NO: 998 - RNA, 22 nt, Homo sapiens
  source 1..22: mol_type = genomic RNA
aactagtaatgttggattaggg

SEQ ID NO: 999 - RNA, 22 nt, Homo sapiens
  source 1..22: mol_type = genomic RNA
atatgtatatgtgactgctact

SEQ ID NO: 1000 - RNA, 21 nt, Homo sapiens
  source 1..21: mol_type = genomic RNA
actccagttttagttctcttg

SEQ ID NO: 1001 - RNA, 22 nt, Homo sapiens
  source 1..22: mol_type = genomic RNA
aagagaactgaaagtggagcct

SEQ ID NO: 1002 - RNA, 21 nt, Homo sapiens
  source 1..21: mol_type = genomic RNA
tggccaaaaagcaggcagaga

SEQ ID NO: 1003 - RNA, 22 nt, Homo sapiens
  source 1..22: mol_type = genomic RNA
caggtagatatttgataggcat

SEQ ID NO: 1004 - RNA, 21 nt, Homo sapiens
  source 1..21: mol_type = genomic RNA
gcctatcacatatctgcctgt

SEQ ID NO: 1005 - RNA, 22 nt, Homo sapiens
  source 1..22: mol_type = genomic RNA
ggaggaaccttggagcttcggc

SEQ ID NO: 1006 - RNA, 23 nt, Homo sapiens
  source 1..23: mol_type = genomic RNA
gaggctgatgtgagtagaccact

SEQ ID NO: 1007 - RNA, 22 nt, Homo sapiens
  source 1..22: mol_type = genomic RNA
tgctcaggttgcacagctggga

SEQ ID NO: 1008 - RNA, 22 nt, Homo sapiens
  source 1..22: mol_type = genomic RNA
tcaggtgtggaaactgaggcag

SEQ ID NO: 1009 - RNA, 22 nt, Homo sapiens
  source 1..22: mol_type = genomic RNA
tgtagatacgagcaccagccac

SEQ ID NO: 1010 - RNA, 22 nt, Homo sapiens
  source 1..22: mol_type = genomic RNA
taaggggtgtatggcagatgca

SEQ ID NO: 1011 - RNA, 23 nt, Homo sapiens
  source 1..23: mol_type = genomic RNA
acaggcggctgtagcaatggggg

SEQ ID NO: 1012 - RNA, 22 nt, Homo sapiens
  source 1..22: mol_type = genomic RNA
aattcccttgtagataacccgg

SEQ ID NO: 1013 - RNA, 22 nt, Homo sapiens
  source 1..22: mol_type = genomic RNA
tacgcgcagaccacaggatgtc

SEQ ID NO: 1014 - RNA, 22 nt, Homo sapiens
  source 1..22: mol_type = genomic RNA
cagcccggatcccagcccactt

SEQ ID NO: 1015 - RNA, 20 nt, Homo sapiens
  source 1..20: mol_type = genomic RNA
gtgggttggggcgggctctg

SEQ ID NO: 1016 - RNA, 22 nt, Homo sapiens
  source 1..22: mol_type = genomic RNA
ttacacacaactgaggatcata

SEQ ID NO: 1017 - RNA, 21 nt, Homo sapiens
  source 1..21: mol_type = genomic RNA
tttcagataacagtattacat

SEQ ID NO: 1018 - RNA, 22 nt, Homo sapiens
  source 1..22: mol_type = genomic RNA
aagcaatactgttacctgaaat

SEQ ID NO: 1019 - RNA, 23 nt, Homo sapiens
  source 1..23: mol_type = genomic RNA
tagcccccaggcttcacttggcg

SEQ ID NO: 1020 - RNA, 23 nt, Homo sapiens
  source 1..23: mol_type = genomic RNA
ttcgggctggcctgctgctccgg

SEQ ID NO: 1021 - RNA, 21 nt, Homo sapiens
  source 1..21: mol_type = genomic RNA
tgtgcagcaggccaaccgaga

SEQ ID NO: 1022 - RNA, 23 nt, Homo sapiens
  source 1..23: mol_type = genomic RNA
agggcataggagagggttgatat

SEQ ID NO: 1023 - RNA, 20 nt, Homo sapiens
  source 1..20: mol_type = genomic RNA
ggcggcggcggaggcggggg

SEQ ID NO: 1024 - RNA, 22 nt, Homo sapiens
  source 1..22: mol_type = genomic RNA
ctgccagccccgttccagggca

SEQ ID NO: 1025 - RNA, 23 nt, Homo sapiens
  source 1..23: mol_type = genomic RNA
acaaagtacagcattagccttag

SEQ ID NO: 1026 - RNA, 23 nt, Homo sapiens
  source 1..23: mol_type = genomic RNA
aaaggtcattgtaaggttaatgc

SEQ ID NO: 1027 - RNA, 22 nt, Homo sapiens
  source 1..22: mol_type = genomic RNA
tgaggctaatgcactacttcac

SEQ ID NO: 1028 - RNA, 24 nt, Homo sapiens
  source 1..24: mol_type = genomic RNA
tatagagagcaggaagattaatgt

SEQ ID NO: 1029 - RNA, 23 nt, Homo sapiens
  source 1..23: mol_type = genomic RNA
gtgcttcatcgtaattaacctta

SEQ ID NO: 1030 - RNA, 24 nt, Homo sapiens
  source 1..24: mol_type = genomic RNA
gtggaaagcatgcatccagggtgt

SEQ ID NO: 1031 - RNA, 22 nt, Homo sapiens
  source 1..22: mol_type = genomic RNA
gaatgttgctcggtgaacccct

SEQ ID NO: 1032 - RNA, 23 nt, Homo sapiens
  source 1..23: mol_type = genomic RNA
aggttacccgagcaactttgcat

SEQ ID NO: 1033 - RNA, 21 nt, Homo sapiens
  source 1..21: mol_type = genomic RNA
aatataacacagatggcctgt

SEQ ID NO: 1034 - RNA, 22 nt, Homo sapiens
  source 1..22: mol_type = genomic RNA
tatgtaacacggtccactaacc

SEQ ID NO: 1035 - RNA, 21 nt, Homo sapiens
  source 1..21: mol_type = genomic RNA
tagtagaccgtatagcgtacg

SEQ ID NO: 1036 - RNA, 23 nt, Homo sapiens
  source 1..23: mol_type = genomic RNA
acttcacctggtccactagccgt

SEQ ID NO: 1037 - RNA, 23 nt, Homo sapiens
  source 1..23: mol_type = genomic RNA
atcaacagacattaattgggcgc

SEQ ID NO: 1038 - RNA, 22 nt, Homo sapiens
  source 1..22: mol_type = genomic RNA
actggacttagggtcagaaggc

SEQ ID NO: 1039 - RNA, 23 nt, Homo sapiens
  source 1..23: mol_type = genomic RNA
agctcggtctgaggcccctcagt

SEQ ID NO: 1040 - RNA, 23 nt, Homo sapiens
  source 1..23: mol_type = genomic RNA
tgaggggcagagagcgagacttt

SEQ ID NO: 1041 - RNA, 21 nt, Homo sapiens
  source 1..21: mol_type = genomic RNA
caaaacgtgaggcgctgctat

SEQ ID NO: 1042 - RNA, 22 nt, Homo sapiens
  source 1..22: mol_type = genomic RNA
cagcagcaattcatgttttgaa

SEQ ID NO: 1043 - RNA, 17 nt, Homo sapiens
  source 1..17: mol_type = genomic RNA
cctgagaaaagggccaa

SEQ ID NO: 1044 - RNA, 19 nt, Homo sapiens
  source 1..19: mol_type = genomic RNA
ggccactgagtcagcacca

SEQ ID NO: 1045 - RNA, 18 nt, Homo sapiens
  source 1..18: mol_type = genomic RNA
agggcatgtccagggggt

SEQ ID NO: 1046 - RNA, 22 nt, Homo sapiens
  source 1..22: mol_type = genomic RNA
atcgggaatgtcgtgtccgccc

SEQ ID NO: 1047 - RNA, 23 nt, Homo sapiens
  source 1..23: mol_type = genomic RNA
gcctggagctactccaccatctc

SEQ ID NO: 1048 - RNA, 17 nt, Homo sapiens
  source 1..17: mol_type = genomic RNA
cagtgttcagagatgga

SEQ ID NO: 1049 - RNA, 23 nt, Homo sapiens
  source 1..23: mol_type = genomic RNA
aatgacacgatcactcccgttga

SEQ ID NO: 1050 - RNA, 18 nt, Homo sapiens
  source 1..18: mol_type = genomic RNA
atctgacctgatgaaggt

SEQ ID NO: 1051 - RNA, 18 nt, Homo sapiens
  source 1..18: mol_type = genomic RNA
ccagaggtggggactgag

SEQ ID NO: 1052 - RNA, 17 nt, Homo sapiens
  source 1..17: mol_type = genomic RNA
ccccgccaccgccttgg

SEQ ID NO: 1053 - RNA, 22 nt, Homo sapiens
  source 1..22: mol_type = genomic RNA
cagttgggtctaggggtcagga

SEQ ID NO: 1054 - RNA, 19 nt, Homo sapiens
  source 1..19: mol_type = genomic RNA
cttggggcatggagtccca

SEQ ID NO: 1055 - RNA, 16 nt, Homo sapiens
  source 1..16: mol_type = genomic RNA
aggaaacagggaccca

SEQ ID NO: 1056 - RNA, 17 nt, Homo sapiens
  source 1..17: mol_type = genomic RNA
gacattcagactacctg

SEQ ID NO: 1057 - RNA, 18 nt, Homo sapiens
  source 1..18: mol_type = genomic RNA
attctaagtgccttggcc

SEQ ID NO: 1058 - RNA, 17 nt, Homo sapiens
  source 1..17: mol_type = genomic RNA
actcagtcatggtcatt

SEQ ID NO: 1059 - RNA, 19 nt, Homo sapiens
  source 1..19: mol_type = genomic RNA
ctgtgggctcagctctggg

SEQ ID NO: 1060 - RNA, 16 nt, Homo sapiens
  source 1..16: mol_type = genomic RNA
ctaggaggccttggcc

SEQ ID NO: 1061 - RNA, 16 nt, Homo sapiens
  source 1..16: mol_type = genomic RNA
tccagctcggtggcac

SEQ ID NO: 1062 - RNA, 21 nt, Homo sapiens
  source 1..21: mol_type = genomic RNA
ggctcctcctctcaggatgtg

SEQ ID NO: 1063 - RNA, 21 nt, Homo sapiens
  source 1..21: mol_type = genomic RNA
gcaggcacagacagccctggc

SEQ ID NO: 1064 - RNA, 20 nt, Homo sapiens
  source 1..20: mol_type = genomic RNA
tcagggagtcaggggagggc

SEQ ID NO: 1065 - RNA, 19 nt, Homo sapiens
  source 1..19: mol_type = genomic RNA
gggggaagaaaaggtgggg

SEQ ID NO: 1066 - RNA, 18 nt, Homo sapiens
  source 1..18: mol_type = genomic RNA
cattcaactagtgattgt

SEQ ID NO: 1067 - RNA, 18 nt, Homo sapiens
  source 1..18: mol_type = genomic RNA
gtgttctctgatggacag

SEQ ID NO: 1068 - RNA, 18 nt, Homo sapiens
  source 1..18: mol_type = genomic RNA
cagcagtccctccccctg

SEQ ID NO: 1069 - RNA, 17 nt, Homo sapiens
  source 1..17: mol_type = genomic RNA
ccaattaccacttcttt

SEQ ID NO: 1070 - RNA, 17 nt, Homo sapiens
  source 1..17: mol_type = genomic RNA
ctcagtgactcatgtgc

SEQ ID NO: 1071 - RNA, 21 nt, Homo sapiens
  source 1..21: mol_type = genomic RNA
gcagttctgagcacagtacac

SEQ ID NO: 1072 - RNA, 18 nt, Homo sapiens
  source 1..18: mol_type = genomic RNA
ctagggggtttgcccttg

SEQ ID NO: 1073 - RNA, 16 nt, Homo sapiens
  source 1..16: mol_type = genomic RNA
ctctcctcccggcttc

SEQ ID NO: 1074 - RNA, 21 nt, Homo sapiens
  source 1..21: mol_type = genomic RNA
gagtgtagttctgagcagagc

SEQ ID NO: 1075 - RNA, 18 nt, Homo sapiens
  source 1..18: mol_type = genomic RNA
gggtcccggggagggggg

SEQ ID NO: 1076 - RNA, 18 nt, Homo sapiens
  source 1..18: mol_type = genomic RNA
taaaatttgcatccagga

SEQ ID NO: 1077 - RNA, 17 nt, Homo sapiens
  source 1..17: mol_type = genomic RNA
tggggctcagcgagttt

SEQ ID NO: 1078 - RNA, 18 nt, Homo sapiens
  source 1..18: mol_type = genomic RNA
gggctcacatcaccccat

SEQ ID NO: 1079 - RNA, 18 nt, Homo sapiens
  source 1..18: mol_type = genomic RNA
gcggcgagtccgactcat

SEQ ID NO: 1080 - RNA, 17 nt, Homo sapiens
  source 1..17: mol_type = genomic RNA
accccactcctggtacc

SEQ ID NO: 1081 - RNA, 19 nt, Homo sapiens
  source 1..19: mol_type = genomic RNA
tctcccttgagggcacttt

SEQ ID NO: 1082 - RNA, 17 nt, Homo sapiens
  source 1..17: mol_type = genomic RNA
ttgtctgctgagtttcc

SEQ ID NO: 1083 - RNA, 19 nt, Homo sapiens
  source 1..19: mol_type = genomic RNA
gcattgtgcagggctatca

SEQ ID NO: 1084 - RNA, 22 nt, Homo sapiens
  source 1..22: mol_type = genomic RNA
taatactgtctggtaaaaccgt

SEQ ID NO: 1085 - RNA, 19 nt, Homo sapiens
  source 1..19: mol_type = genomic RNA
tgccctcctttcttccctc

SEQ ID NO: 1086 - RNA, 16 nt, Homo sapiens
  source 1..16: mol_type = genomic RNA
ttcagcaggaacagct

SEQ ID NO: 1087 - RNA, 18 nt, Homo sapiens
  source 1..18: mol_type = genomic RNA
cccctgggccggccttgg

SEQ ID NO: 1088 - RNA, 17 nt, Homo sapiens
  source 1..17: mol_type = genomic RNA
cagcctgacaggaacag

SEQ ID NO: 1089 - RNA, 17 nt, Homo sapiens
  source 1..17: mol_type = genomic RNA
gggagtctacagcaggg

SEQ ID NO: 1090 - RNA, 18 nt, Homo sapiens
  source 1..18: mol_type = genomic RNA
cagtgcaatgttttcctt

SEQ ID NO: 1091 - RNA, 17 nt, Homo sapiens
  source 1..17: mol_type = genomic RNA
atgtgggctcaggctca

SEQ ID NO: 1092 - RNA, 16 nt, Homo sapiens
  source 1..16: mol_type = genomic RNA
tgccttcctgtctgtg

SEQ ID NO: 1093 - RNA, 22 nt, Homo sapiens
  source 1..22: mol_type = genomic RNA
ctgggacaggaggaggaggcag

SEQ ID NO: 1094 - RNA, 18 nt, Homo sapiens
  source 1..18: mol_type = genomic RNA
gctggtgacatgagaggc

SEQ ID NO: 1095 - RNA, 18 nt, Homo sapiens
  source 1..18: mol_type = genomic RNA
tgggagctggactacttc

SEQ ID NO: 1096 - RNA, 20 nt, Homo sapiens
  source 1..20: mol_type = genomic RNA
tcccactacttcacttgtga

SEQ ID NO: 1097 - RNA, 18 nt, Homo sapiens
  source 1..18: mol_type = genomic RNA
ccagtgtggctcagcgag

SEQ ID NO: 1098 - RNA, 17 nt, Homo sapiens
  source 1..17: mol_type = genomic RNA
ttctgagctgaggacag

SEQ ID NO: 1099 - RNA, 17 nt, Homo sapiens
  source 1..17: mol_type = genomic RNA
ccggcatgtccagggca

SEQ ID NO: 1100 - RNA, 18 nt, Homo sapiens
  source 1..18: mol_type = genomic RNA
cctagacacctccagttc

SEQ ID NO: 1101 - RNA, 17 nt, Homo sapiens
  source 1..17: mol_type = genomic RNA
tggagagaaaggcagta

SEQ ID NO: 1102 - RNA, 19 nt, Homo sapiens
  source 1..19: mol_type = genomic RNA
aatgttttttcctgtttcc

SEQ ID NO: 1103 - RNA, 18 nt, Homo sapiens
  source 1..18: mol_type = genomic RNA
tccctggagtttcttctt

SEQ ID NO: 1104 - RNA, 18 nt, Homo sapiens
  source 1..18: mol_type = genomic RNA
ctggagtctaggattcca

SEQ ID NO: 1105 - RNA, 16 nt, Homo sapiens
  source 1..16: mol_type = genomic RNA
gcagcattcatgtccc

SEQ ID NO: 1106 - RNA, 18 nt, Homo sapiens
  source 1..18: mol_type = genomic RNA
gaaagagagctgagtgtg

SEQ ID NO: 1107 - RNA, 19 nt, Homo sapiens
  source 1..19: mol_type = genomic RNA
ggccttgttcctgtcccca

SEQ ID NO: 1108 - RNA, 20 nt, Homo sapiens
  source 1..20: mol_type = genomic RNA
agccccctggccccaaaccc

SEQ ID NO: 1109 - RNA, 22 nt, Homo sapiens
  source 1..22: mol_type = genomic RNA
caggtcgtcttgcagggcttct

SEQ ID NO: 1110 - RNA, 18 nt, Homo sapiens
  source 1..18: mol_type = genomic RNA
ctctgggaaatgggacag

SEQ ID NO: 1111 - RNA, 18 nt, Homo sapiens
  source 1..18: mol_type = genomic RNA
ccgctttctgagctggac

SEQ ID NO: 1112 - RNA, 21 nt, Homo sapiens
  source 1..21: mol_type = genomic RNA
tgtcttgcaggccgtcatgca

SEQ ID NO: 1113 - RNA, 17 nt, Homo sapiens
  source 1..17: mol_type = genomic RNA
ggtgaggctagctggtg

SEQ ID NO: 1114 - RNA, 17 nt, Homo sapiens
  source 1..17: mol_type = genomic RNA
acattgccagggagttt

SEQ ID NO: 1115 - RNA, 17 nt, Homo sapiens
  source 1..17: mol_type = genomic RNA
cactgtgggtacatgct

SEQ ID NO: 1116 - RNA, 17 nt, Homo sapiens
  source 1..17: mol_type = genomic RNA
tccctgagcaaagccac

SEQ ID NO: 1117 - RNA, 18 nt, Homo sapiens
  source 1..18: mol_type = genomic RNA
gggattctgtagcttcct

SEQ ID NO: 1118 - RNA, 21 nt, Homo sapiens
  source 1..21: mol_type = genomic RNA
ttagcggtggaccgccctgcg

SEQ ID NO: 1119 - RNA, 21 nt, Homo sapiens
  source 1..21: mol_type = genomic RNA
ctgtgggctcagcgcgtgggg

SEQ ID NO: 1120 - RNA, 18 nt, Homo sapiens
  source 1..18: mol_type = genomic RNA
cagccccacagcctcaga

SEQ ID NO: 1121 - RNA, 21 nt, Homo sapiens
  source 1..21: mol_type = genomic RNA
ctggatggctcctccatgtct

SEQ ID NO: 1122 - RNA, 20 nt, Homo sapiens
  source 1..20: mol_type = genomic RNA
ccctgagaccctaaccttaa

SEQ ID NO: 1123 - RNA, 18 nt, Homo sapiens
  source 1..18: mol_type = genomic RNA
ttgcacttgtctcagtga

SEQ ID NO: 1124 - RNA, 23 nt, Homo sapiens
  source 1..23: mol_type = genomic RNA
tcttggagtaggtcattgggtgg

SEQ ID NO: 1125 - RNA, 20 nt, Homo sapiens
  source 1..20: mol_type = genomic RNA
tgttcctctgtctcccagac

SEQ ID NO: 1126 - RNA, 19 nt, Homo sapiens
  source 1..19: mol_type = genomic RNA
ggcttgcatgggggactgg

SEQ ID NO: 1127 - RNA, 17 nt, Homo sapiens
  source 1..17: mol_type = genomic RNA
ccagttttcccaggatt

SEQ ID NO: 1128 - RNA, 19 nt, Homo sapiens
  source 1..19: mol_type = genomic RNA
cctgagaccctagttccac

SEQ ID NO: 1129 - RNA, 22 nt, Homo sapiens
  source 1..22: mol_type = genomic RNA
atcatgatgggctcctcggtgt

SEQ ID NO: 1130 - RNA, 19 nt, Homo sapiens
  source 1..19: mol_type = genomic RNA
cctcagatcagagccttgc

SEQ ID NO: 1131 - RNA, 18 nt, Homo sapiens
  source 1..18: mol_type = genomic RNA
ggtgggcttcccggaggg

SEQ ID NO: 1132 - RNA, 18 nt, Homo sapiens
  source 1..18: mol_type = genomic RNA
cactgcaggactcagcag

SEQ ID NO: 1133 - RNA, 17 nt, Homo sapiens
  source 1..17: mol_type = genomic RNA
tgagggaggagactgca

SEQ ID NO: 1134 - RNA, 18 nt, Homo sapiens
  source 1..18: mol_type = genomic RNA
gaggctgaaggaagatgg

SEQ ID NO: 1135 - RNA, 22 nt, Homo sapiens
  source 1..22: mol_type = genomic RNA
gtcactgatgtctgtagctgag

SEQ ID NO: 1136 - RNA, 22 nt, Homo sapiens
  source 1..22: mol_type = genomic RNA
acctgtctgtggaaaggagcta

SEQ ID NO: 1137 - RNA, 21 nt, Homo sapiens
  source 1..21: mol_type = genomic RNA
aaaagcatcaggaagtaccca

SEQ ID NO: 1138 - RNA, 21 nt, Homo sapiens
  source 1..21: mol_type = genomic RNA
ataggcaccaaaaagcaacaa

SEQ ID NO: 1139 - RNA, 22 nt, Homo sapiens
  source 1..22: mol_type = genomic RNA
agttgcctttttgttcccatgc

SEQ ID NO: 1140 - RNA, 22 nt, Homo sapiens
  source 1..22: mol_type = genomic RNA
agagttaactcaaaatggacta

SEQ ID NO: 1141 - RNA, 22 nt, Homo sapiens
  source 1..22: mol_type = genomic RNA
tgttgggattcagcaggaccat

SEQ ID NO: 1142 - RNA, 17 nt, Homo sapiens
  source 1..17: mol_type = genomic RNA
gaagatggacgtacttt

SEQ ID NO: 1143 - RNA, 21 nt, Homo sapiens
  source 1..21: mol_type = genomic RNA
tctgaatagagtctgaagagt

SEQ ID NO: 1144 - RNA, 22 nt, Homo sapiens
  source 1..22: mol_type = genomic RNA
caaggagacgggaacatggagc

SEQ ID NO: 1145 - RNA, 20 nt, Homo sapiens
  source 1..20: mol_type = genomic RNA
aaaagctgggctgagaggcg

SEQ ID NO: 1146 - RNA, 18 nt, Homo sapiens
  source 1..18: mol_type = genomic RNA
aggctggagtgagcggag

SEQ ID NO: 1147 - RNA, 22 nt, Homo sapiens
  source 1..22: mol_type = genomic RNA
gcgactctgaaaactagaaggt

SEQ ID NO: 1148 - RNA, 20 nt, Homo sapiens
  source 1..20: mol_type = genomic RNA
aaagactctgcaagatgcct

SEQ ID NO: 1149 - RNA, 21 nt, Homo sapiens
  source 1..21: mol_type = genomic RNA
acaggagtgggggtgggacat

SEQ ID NO: 1150 - RNA, 21 nt, Homo sapiens
  source 1..21: mol_type = genomic RNA
cgtcccaccccccactcctgt

SEQ ID NO: 1151 - RNA, 18 nt, Homo sapiens
  source 1..18: mol_type = genomic RNA
aggagaagtaaagtagaa

SEQ ID NO: 1152 - RNA, 22 nt, Homo sapiens
  source 1..22: mol_type = genomic RNA
atggccagagctcacacagagg

SEQ ID NO: 1153 - RNA, 21 nt, Homo sapiens
  source 1..21: mol_type = genomic RNA
gcaggacaggcagaagtggat

SEQ ID NO: 1154 - RNA, 22 nt, Homo sapiens
  source 1..22: mol_type = genomic RNA
cagggcaggaagaagtggacaa

SEQ ID NO: 1155 - RNA, 22 nt, Homo sapiens
  source 1..22: mol_type = genomic RNA
gtccacttctgcctgccctgcc

SEQ ID NO: 1156 - RNA, 21 nt, Homo sapiens
  source 1..21: mol_type = genomic RNA
tgggctcagggtacaaaggtt

SEQ ID NO: 1157 - RNA, 21 nt, Homo sapiens
  source 1..21: mol_type = genomic RNA
cacaggcttagaaaagacagt

SEQ ID NO: 1158 - RNA, 22 nt, Homo sapiens
  source 1..22: mol_type = genomic RNA
gtgactgataccttggaggcat

SEQ ID NO: 1159 - RNA, 22 nt, Homo sapiens
  source 1..22: mol_type = genomic RNA
tgtcgtggggcttgctggcttg

SEQ ID NO: 1160 - RNA, 17 nt, Homo sapiens
  source 1..17: mol_type = genomic RNA
acagggaggagattgta

SEQ ID NO: 1161 - RNA, 17 nt, Homo sapiens
  source 1..17: mol_type = genomic RNA
gccggacaagagggagg

SEQ ID NO: 1162 - RNA, 17 nt, Homo sapiens
  source 1..17: mol_type = genomic RNA
ttggaggcgtgggtttt

SEQ ID NO: 1163 - RNA, 18 nt, Homo sapiens
  source 1..18: mol_type = genomic RNA
ctcgagttggaagaggcg

SEQ ID NO: 1164 - RNA, 21 nt, Homo sapiens
  source 1..21: mol_type = genomic RNA
cacggcaaaagaaacaatcca

SEQ ID NO: 1165 - RNA, 22 nt, Homo sapiens
  source 1..22: mol_type = genomic RNA
agattgtttcttttgccgtgca

SEQ ID NO: 1166 - RNA, 22 nt, Homo sapiens
  source 1..22: mol_type = genomic RNA
cagggctggcagtgacatgggt

SEQ ID NO: 1167 - RNA, 22 nt, Homo sapiens
  source 1..22: mol_type = genomic RNA
atttccctgccattcccttggc

SEQ ID NO: 1168 - RNA, 17 nt, Homo sapiens
  source 1..17: mol_type = genomic RNA
ggtgggggctgttgttt

SEQ ID NO: 1169 - RNA, 20 nt, Homo sapiens
  source 1..20: mol_type = genomic RNA
ggctccttggtctaggggta

SEQ ID NO: 1170 - RNA, 22 nt, Homo sapiens
  source 1..22: mol_type = genomic RNA
cgtcccggggctgcgcgaggca

SEQ ID NO: 1171 - RNA, 22 nt, Homo sapiens
  source 1..22: mol_type = genomic RNA
tggggatttggagaagtggtga

SEQ ID NO: 1172 - RNA, 17 nt, Homo sapiens
  source 1..17: mol_type = genomic RNA
tggtagagctgaggaca

SEQ ID NO: 1173 - RNA, 23 nt, Homo sapiens
  source 1..23: mol_type = genomic RNA
ttgaattcttggccttaagtgat

SEQ ID NO: 1174 - RNA, 20 nt, Homo sapiens
  source 1..20: mol_type = genomic RNA
gagcttggtctgtagcggtt

SEQ ID NO: 1175 - RNA, 20 nt, Homo sapiens
  source 1..20: mol_type = genomic RNA
ggatccgagtcacggcacca

SEQ ID NO: 1176 - RNA, 17 nt, Homo sapiens
  source 1..17: mol_type = genomic RNA
agggtgtgtgtgttttt

SEQ ID NO: 1177 - RNA, 17 nt, Homo sapiens
  source 1..17: mol_type = genomic RNA
cctggtggcttcctttt

SEQ ID NO: 1178 - RNA, 22 nt, Homo sapiens
  source 1..22: mol_type = genomic RNA
tcacaaggtattgactggcgta

SEQ ID NO: 1179 - RNA, 19 nt, Homo sapiens
  source 1..19: mol_type = genomic RNA
agaggtaggtgtggaagaa

SEQ ID NO: 1180 - RNA, 22 nt, Homo sapiens
  source 1..22: mol_type = genomic RNA
ccaggaggcggaggaggtggag

SEQ ID NO: 1181 - RNA, 22 nt, Homo sapiens
  source 1..22: mol_type = genomic RNA
atagtggttgtgaatttacctt

SEQ ID NO: 1182 - RNA, 23 nt, Homo sapiens
  source 1..23: mol_type = genomic RNA
gattgagactagtagggctaggc

SEQ ID NO: 1183 - RNA, 23 nt, Homo sapiens
  source 1..23: mol_type = genomic RNA
tgacacggagggtggcttgggaa

SEQ ID NO: 1184 - RNA, 17 nt, Homo sapiens
  source 1..17: mol_type = genomic RNA
gagactggggtggggcc

SEQ ID NO: 1185 - RNA, 21 nt, Homo sapiens
  source 1..21: mol_type = genomic RNA
aaggtttggatagatgcaata

SEQ ID NO: 1186 - RNA, 22 nt, Homo sapiens
  source 1..22: mol_type = genomic RNA
ctcaagtagtctgaccagggga

SEQ ID NO: 1187 - RNA, 18 nt, Homo sapiens
  source 1..18: mol_type = genomic RNA
gggtgcgggccggcgggg

SEQ ID NO: 1188 - RNA, 22 nt, Homo sapiens
  source 1..22: mol_type = genomic RNA
tggcggcggtagttatgggctt

SEQ ID NO: 1189 - RNA, 18 nt, Homo sapiens
  source 1..18: mol_type = genomic RNA
agagcagaaggatgagat

SEQ ID NO: 1190 - RNA, 22 nt, Homo sapiens
  source 1..22: mol_type = genomic RNA
gctccctctagggtcgctcgga

SEQ ID NO: 1191 - RNA, 21 nt, Homo sapiens
  source 1..21: mol_type = genomic RNA
tggcaaacgtggaagccgaga

SEQ ID NO: 1192 - RNA, 22 nt, Homo sapiens
  source 1..22: mol_type = genomic RNA
ggaaagctaggaggctgtacag

SEQ ID NO: 1193 - RNA, 21 nt, Homo sapiens
  source 1..21: mol_type = genomic RNA
gaaagacagtagattgtatag

SEQ ID NO: 1194 - RNA, 22 nt, Homo sapiens
  source 1..22: mol_type = genomic RNA
aactatacaacctactacctca

SEQ ID NO: 1195 - RNA, 22 nt, Homo sapiens
  source 1..22: mol_type = genomic RNA
gggaaggcagtaggttgtatag

SEQ ID NO: 1196 - RNA, 22 nt, Homo sapiens
  source 1..22: mol_type = genomic RNA
aaccacacaacctactacctca

SEQ ID NO: 1197 - RNA, 22 nt, Homo sapiens
  source 1..22: mol_type = genomic RNA
aaccatacaacctactacctca

SEQ ID NO: 1198 - RNA, 22 nt, Homo sapiens
  source 1..22: mol_type = genomic RNA
agaaaggcagcaggtcgtatag

SEQ ID NO: 1199 - RNA, 22 nt, Homo sapiens
  source 1..22: mol_type = genomic RNA
aactatgcaacctactacctct

SEQ ID NO: 1200 - RNA, 22 nt, Homo sapiens
  source 1..22: mol_type = genomic RNA
ggaaagctaggaggccgtatag

SEQ ID NO: 1201 - RNA, 22 nt, Homo sapiens
  source 1..22: mol_type = genomic RNA
aactatacaacctcctacctca

SEQ ID NO: 1202 - RNA, 22 nt, Homo sapiens
  source 1..22: mol_type = genomic RNA
gggaaggcaatagattgtatag

SEQ ID NO: 1203 - RNA, 22 nt, Homo sapiens
  source 1..22: mol_type = genomic RNA
ggaaagacagtagactgtatag

SEQ ID NO: 1204 - RNA, 22 nt, Homo sapiens
  source 1..22: mol_type = genomic RNA
aactatacaatctactacctca

SEQ ID NO: 1205 - RNA, 21 nt, Homo sapiens
  source 1..21: mol_type = genomic RNA
gcaaggcagtggcctgtacag

SEQ ID NO: 1206 - RNA, 22 nt, Homo sapiens
  source 1..22: mol_type = genomic RNA
aactgtacaaactactacctca

SEQ ID NO: 1207 - RNA, 22 nt, Homo sapiens
  source 1..22: mol_type = genomic RNA
agcaaggcagtagcttgcgcag

SEQ ID NO: 1208 - RNA, 22 nt, Homo sapiens
  source 1..22: mol_type = genomic RNA
aacagcacaaactactacctca

SEQ ID NO: 1209 - RNA, 22 nt, Homo sapiens
  source 1..22: mol_type = genomic RNA
atacatacttctttacattcca

SEQ ID NO: 1210 - RNA, 22 nt, Homo sapiens
  source 1..22: mol_type = genomic RNA
catacctatagatacaagcttg

SEQ ID NO: 1211 - RNA, 22 nt, Homo sapiens
  source 1..22: mol_type = genomic RNA
cacaagttcggatctacgggtt

SEQ ID NO: 1212 - RNA, 21 nt, Homo sapiens
  source 1..21: mol_type = genomic RNA
ttcagttatcacagtactgta

SEQ ID NO: 1213 - RNA, 22 nt, Homo sapiens
  source 1..22: mol_type = genomic RNA
agcatcagcactgtgataactg

SEQ ID NO: 1214 - RNA, 23 nt, Homo sapiens
  source 1..23: mol_type = genomic RNA
caaggcagcactgtaaagaagct

SEQ ID NO: 1215 - RNA, 23 nt, Homo sapiens
  source 1..23: mol_type = genomic RNA
tcatagccctgtacaatgctgct

SEQ ID NO: 1216 - RNA, 23 nt, Homo sapiens
  source 1..23: mol_type = genomic RNA
agcagcattgtacagggctatga

SEQ ID NO: 1217 - RNA, 22 nt, Homo sapiens
  source 1..22: mol_type = genomic RNA
tagcacatgctcaaacatccgt

SEQ ID NO: 1218 - RNA, 23 nt, Homo sapiens
  source 1..23: mol_type = genomic RNA
accacaggagtctgagcatttga

SEQ ID NO: 1219 - RNA, 22 nt, Homo sapiens
  source 1..22: mol_type = genomic RNA
gtaagaagtgcttacattgcag

SEQ ID NO: 1220 - RNA, 23 nt, Homo sapiens
  source 1..23: mol_type = genomic RNA
ctacctgcactgtaagcactttt

SEQ ID NO: 1221 - RNA, 22 nt, Homo sapiens
  source 1..22: mol_type = genomic RNA
gcagcaagtacccacagtgcgg

SEQ ID NO: 1222 - RNA, 21 nt, Homo sapiens
  source 1..21: mol_type = genomic RNA
atctgcactgtcagcacttta

SEQ ID NO: 1223 - RNA, 23 nt, Homo sapiens
  source 1..23: mol_type = genomic RNA
tgatagccctgtacaatgctgct

SEQ ID NO: 1224 - RNA, 22 nt, Homo sapiens
  source 1..22: mol_type = genomic RNA
tattcccctagatacgaatttg

SEQ ID NO: 1225 - RNA, 23 nt, Homo sapiens
  source 1..23: mol_type = genomic RNA
cacaaattcggatctacagggta

SEQ ID NO: 1226 - RNA, 22 nt, Homo sapiens
  source 1..22: mol_type = genomic RNA
attcccctagaatcgaatctgt

SEQ ID NO: 1227 - RNA, 23 nt, Homo sapiens
  source 1..23: mol_type = genomic RNA
cacaaattcggttctacagggta

SEQ ID NO: 1228 - RNA, 21 nt, Homo sapiens
  source 1..21: mol_type = genomic RNA
ctagggaagaacagtgagcaa

SEQ ID NO: 1229 - RNA, 18 nt, Homo sapiens
  source 1..18: mol_type = genomic RNA
catgctcagctgaccctg

SEQ ID NO: 1230 - RNA, 21 nt, Homo sapiens
  source 1..21: mol_type = genomic RNA
ccaaccaatgaaagaatgctt

SEQ ID NO: 1231 - RNA, 22 nt, Homo sapiens
  source 1..22: mol_type = genomic RNA
acacacccacgcgagccggaaa

SEQ ID NO: 1232 - RNA, 21 nt, Homo sapiens
  source 1..21: mol_type = genomic RNA
cggctcgggtggcggcgacgg

SEQ ID NO: 1233 - RNA, 23 nt, Homo sapiens
  source 1..23: mol_type = genomic RNA
gtcacatccctcccaagaccctc

SEQ ID NO: 1234 - RNA, 27 nt, Homo sapiens
  source 1..27: mol_type = genomic RNA
tgcccactctcaccatcacctacagtg

SEQ ID NO: 1235 - RNA, 23 nt, Homo sapiens
  source 1..23: mol_type = genomic RNA
ggaagccatcaagtcgctgcagg

SEQ ID NO: 1236 - RNA, 22 nt, Homo sapiens
  source 1..22: mol_type = genomic RNA
ataagagtctccccctgtatat

SEQ ID NO: 1237 - RNA, 22 nt, Homo sapiens
  source 1..22: mol_type = genomic RNA
atgagagtctccccctgtatat

SEQ ID NO: 1238 - RNA, 21 nt, Homo sapiens
  source 1..21: mol_type = genomic RNA
aacatacaaagggtatcctct

SEQ ID NO: 1239 - RNA, 23 nt, Homo sapiens
  source 1..23: mol_type = genomic RNA
gcacgtcaccggtctaccatccc

SEQ ID NO: 1240 - RNA, 21 nt, Homo sapiens
  source 1..21: mol_type = genomic RNA
agaagtagaccatgtgtccta

SEQ ID NO: 1241 - RNA, 22 nt, Homo sapiens
  source 1..22: mol_type = genomic RNA
gaggctcagaatggctcaggag

SEQ ID NO: 1242 - RNA, 21 nt, Homo sapiens
  source 1..21: mol_type = genomic RNA
ctcccccactgcagctggcac

SEQ ID NO: 1243 - RNA, 21 nt, Homo sapiens
  source 1..21: mol_type = genomic RNA
gagctgcatcctggctccggg

SEQ ID NO: 1244 - RNA, 21 nt, Homo sapiens
  source 1..21: mol_type = genomic RNA
ataatggagaccaggccacga

SEQ ID NO: 1245 - RNA, 20 nt, Homo sapiens
  source 1..20: mol_type = genomic RNA
ctcaaagcaaaccctgcaga

SEQ ID NO: 1246 - RNA, 21 nt, Homo sapiens
  source 1..21: mol_type = genomic RNA
gcttaaacatctacatgaaca

SEQ ID NO: 1247 - RNA, 18 nt, Homo sapiens
  source 1..18: mol_type = genomic RNA
gaaatgagggccagctga

SEQ ID NO: 1248 - RNA, 21 nt, Homo sapiens
  source 1..21: mol_type = genomic RNA
cccctcccagcctccctgcca

SEQ ID NO: 1249 - RNA, 20 nt, Homo sapiens
  source 1..20: mol_type = genomic RNA
tccgcctgtctgaacagtga

SEQ ID NO: 1250 - RNA, 22 nt, Homo sapiens
  source 1..22: mol_type = genomic RNA
tatttagtgtgataatggcgtt

SEQ ID NO: 1251 - RNA, 21 nt, Homo sapiens
  source 1..21: mol_type = genomic RNA
ctgaggagagaggaggtgggg

SEQ ID NO: 1252 - RNA, 19 nt, Homo sapiens
  source 1..19: mol_type = genomic RNA
ccacctcccgagtcctcac

SEQ ID NO: 1253 - RNA, 22 nt, Homo sapiens
  source 1..22: mol_type = genomic RNA
ctgggggcggcacaggggctca

SEQ ID NO: 1254 - RNA, 22 nt, Homo sapiens
  source 1..22: mol_type = genomic RNA
ccccccactgggccgtacccac

SEQ ID NO: 1255 - RNA, 22 nt, Homo sapiens
  source 1..22: mol_type = genomic RNA
caaacaccattgtcacactcca

SEQ ID NO: 1256 - RNA, 22 nt, Homo sapiens
  source 1..22: mol_type = genomic RNA
ctagggaacacagggctggtga

SEQ ID NO: 1257 - RNA, 26 nt, Homo sapiens
  source 1..26: mol_type = genomic RNA
ccccatccaggcctgcatgccctcac

SEQ ID NO: 1258 - RNA, 20 nt, Homo sapiens
  source 1..20: mol_type = genomic RNA
ctggggaaaagggtggcacg

SEQ ID NO: 1259 - RNA, 17 nt, Homo sapiens
  source 1..17: mol_type = genomic RNA
ccaccgcctggccccac

SEQ ID NO: 1260 - RNA, 20 nt, Homo sapiens
  source 1..20: mol_type = genomic RNA
ggggggcgaggcaggtgtga

SEQ ID NO: 1261 - RNA, 21 nt, Homo sapiens
  source 1..21: mol_type = genomic RNA
cacacacctgcccccgcccac

SEQ ID NO: 1262 - RNA, 23 nt, Homo sapiens
  source 1..23: mol_type = genomic RNA
ctgtgggagggcagtggtgagag

SEQ ID NO: 1263 - RNA, 24 nt, Homo sapiens
  source 1..24: mol_type = genomic RNA
cgctctcccccaaaccctacccac

SEQ ID NO: 1264 - RNA, 20 nt, Homo sapiens
  source 1..20: mol_type = genomic RNA
gcagctgtccgcccagacac

SEQ ID NO: 1265 - RNA, 22 nt, Homo sapiens
  source 1..22: mol_type = genomic RNA
tgccgtgccctggcctcccact

SEQ ID NO: 1266 - RNA, 20 nt, Homo sapiens
  source 1..20: mol_type = genomic RNA
ctgcgggaggacagggctca

SEQ ID NO: 1267 - RNA, 22 nt, Homo sapiens
  source 1..22: mol_type = genomic RNA
gtggggtgggtggtcaggccga

SEQ ID NO: 1268 - RNA, 21 nt, Homo sapiens
  source 1..21: mol_type = genomic RNA
cggcccccccccccccccccc

SEQ ID NO: 1269 - RNA, 22 nt, Homo sapiens
  source 1..22: mol_type = genomic RNA
ctggagagacaaggggaagagg

SEQ ID NO: 1270 - RNA, 22 nt, Homo sapiens
  source 1..22: mol_type = genomic RNA
tccccatttcccctgtcactca

SEQ ID NO: 1271 - RNA, 21 nt, Homo sapiens
  source 1..21: mol_type = genomic RNA
ctgggggacggagcagaagga

SEQ ID NO: 1272 - RNA, 21 nt, Homo sapiens
  source 1..21: mol_type = genomic RNA
cgcgcttcggccccgcccccg

SEQ ID NO: 1273 - RNA, 20 nt, Homo sapiens
  source 1..20: mol_type = genomic RNA
ggggcagacagacgaggaag

SEQ ID NO: 1274 - RNA, 23 nt, Homo sapiens
  source 1..23: mol_type = genomic RNA
cacacactggggctcccactcac

SEQ ID NO: 1275 - RNA, 22 nt, Homo sapiens
  source 1..22: mol_type = genomic RNA
cactcctataattgatccagtt

SEQ ID NO: 1276 - RNA, 20 nt, Homo sapiens
  source 1..20: mol_type = genomic RNA
ggcattcaccgcgtgcctta

SEQ ID NO: 1277 - RNA, 26 nt, Homo sapiens
  source 1..26: mol_type = genomic RNA
aaccatctcatacaaaccaactactt

SEQ ID NO: 1278 - RNA, 21 nt, Homo sapiens
  source 1..21: mol_type = genomic RNA
atgtaggcctttagatcactt

SEQ ID NO: 1279 - RNA, 22 nt, Homo sapiens
  source 1..22: mol_type = genomic RNA
tataggcctttagatcatctga

SEQ ID NO: 1280 - RNA, 21 nt, Homo sapiens
  source 1..21: mol_type = genomic RNA
tttaagtgatctaaaggccta

SEQ ID NO: 1281 - RNA, 22 nt, Homo sapiens
  source 1..22: mol_type = genomic RNA
atcaaggtccgctgtgaacacg

SEQ ID NO: 1282 - RNA, 19 nt, Homo sapiens
  source 1..19: mol_type = genomic RNA
cctgctccaaaaatccatt

SEQ ID NO: 1283 - RNA, 24 nt, Homo sapiens
  source 1..24: mol_type = genomic RNA
gctccagtctcgacgttcccgggg

SEQ ID NO: 1284 - RNA, 22 nt, Homo sapiens
  source 1..22: mol_type = genomic RNA
tccggggacgaacgggacgggt

SEQ ID NO: 1285 - RNA, 27 nt, Homo sapiens
  source 1..27: mol_type = genomic RNA
tttagcacagtgcttatacaagaaggt

SEQ ID NO: 1286 - RNA, 22 nt, Homo sapiens
  source 1..22: mol_type = genomic RNA
tgaagaagggggggaagggcgt

SEQ ID NO: 1287 - RNA, 21 nt, Homo sapiens
  source 1..21: mol_type = genomic RNA
aaaggccacatccagcaccgt

SEQ ID NO: 1288 - RNA, 21 nt, Homo sapiens
  source 1..21: mol_type = genomic RNA
agcgcctttggcagctagagt

SEQ ID NO: 1289 - RNA, 22 nt, Homo sapiens
  source 1..22: mol_type = genomic RNA
taaatgaattcaatttccttct

SEQ ID NO: 1290 - RNA, 21 nt, Homo sapiens
  source 1..21: mol_type = genomic RNA
tgcaggctgatcttcttctct

SEQ ID NO: 1291 - RNA, 24 nt, Homo sapiens
  source 1..24: mol_type = genomic RNA
actgcaggctccagcttccaggct

SEQ ID NO: 1292 - RNA, 23 nt, Homo sapiens
  source 1..23: mol_type = genomic RNA
aatctactttctttgctcatcct

SEQ ID NO: 1293 - RNA, 22 nt, Homo sapiens
  source 1..22: mol_type = genomic RNA
tggatgagcaaagaaagtggtt

SEQ ID NO: 1294 - RNA, 22 nt, Homo sapiens
  source 1..22: mol_type = genomic RNA
aaccactttctttgctcatccg

SEQ ID NO: 1295 - RNA, 22 nt, Homo sapiens
  source 1..22: mol_type = genomic RNA
agctagtgagaagtcaatgcct

SEQ ID NO: 1296 - RNA, 21 nt, Homo sapiens
  source 1..21: mol_type = genomic RNA
ggtcagaacccatcattcact

SEQ ID NO: 1297 - RNA, 21 nt, Homo sapiens
  source 1..21: mol_type = genomic RNA
ttccacgacctaatcctaact

SEQ ID NO: 1298 - RNA, 22 nt, Homo sapiens
  source 1..22: mol_type = genomic RNA
ggctcccaagaacctcacctgt

SEQ ID NO: 1299 - RNA, 24 nt, Homo sapiens
  source 1..24: mol_type = genomic RNA
tcacaggttaaagggtctcaggga

SEQ ID NO: 1300 - RNA, 22 nt, Homo sapiens
  source 1..22: mol_type = genomic RNA
agctcccaagagcctaacccgt

SEQ ID NO: 1301 - RNA, 22 nt, Homo sapiens
  source 1..22: mol_type = genomic RNA
gtcccaagagcctgacttgtga

SEQ ID NO: 1302 - RNA, 22 nt, Homo sapiens
  source 1..22: mol_type = genomic RNA
tcacaagttagggtctcaggga

SEQ ID NO: 1303 - RNA, 18 nt, Homo sapiens
  source 1..18: mol_type = genomic RNA
tggtggcagaggtgggat

SEQ ID NO: 1304 - RNA, 19 nt, Homo sapiens
  source 1..19: mol_type = genomic RNA
atggtggcagtggtgggat

SEQ ID NO: 1305 - RNA, 19 nt, Homo sapiens
  source 1..19: mol_type = genomic RNA
aagccaaagccttatccat

SEQ ID NO: 1306 - RNA, 22 nt, Homo sapiens
  source 1..22: mol_type = genomic RNA
atccttctacaaattcacccat

SEQ ID NO: 1307 - RNA, 22 nt, Homo sapiens
  source 1..22: mol_type = genomic RNA
actcagtatgccagggtaccat

SEQ ID NO: 1308 - RNA, 22 nt, Homo sapiens
  source 1..22: mol_type = genomic RNA
cgcattattactcacggtacga

SEQ ID NO: 1309 - RNA, 23 nt, Homo sapiens
  source 1..23: mol_type = genomic RNA
aacaggtgctcaaataagacttg

SEQ ID NO: 1310 - RNA, 22 nt, Homo sapiens
  source 1..22: mol_type = genomic RNA
aacaacacttgaccacatcctg

SEQ ID NO: 1311 - RNA, 21 nt, Homo sapiens
  source 1..21: mol_type = genomic RNA
cgcgtaccaaaagtaataatg

SEQ ID NO: 1312 - RNA, 23 nt, Homo sapiens
  source 1..23: mol_type = genomic RNA
agccctgttctacagccctgagg

SEQ ID NO: 1313 - RNA, 21 nt, Homo sapiens
  source 1..21: mol_type = genomic RNA
tggggattacacttcaacagg

SEQ ID NO: 1314 - RNA, 18 nt, Homo sapiens
  source 1..18: mol_type = genomic RNA
cccccaccaccacgcccg

SEQ ID NO: 1315 - RNA, 20 nt, Homo sapiens
  source 1..20: mol_type = genomic RNA
cacccccaccaccacgcccg

SEQ ID NO: 1316 - RNA, 22 nt, Homo sapiens
  source 1..22: mol_type = genomic RNA
ccagtagcacggctcagtccag

SEQ ID NO: 1317 - RNA, 22 nt, Homo sapiens
  source 1..22: mol_type = genomic RNA
ccagtagcatggctcagtccag

SEQ ID NO: 1318 - RNA, 23 nt, Homo sapiens
  source 1..23: mol_type = genomic RNA
acacagctcttccatatctccag

SEQ ID NO: 1319 - RNA, 22 nt, Homo sapiens
  source 1..22: mol_type = genomic RNA
tgcctggcacatagcaggcact

SEQ ID NO: 1320 - RNA, 22 nt, Homo sapiens
  source 1..22: mol_type = genomic RNA
tgagtgcttgctaggtgccaag

SEQ ID NO: 1321 - RNA, 26 nt, Homo sapiens
  source 1..26: mol_type = genomic RNA
tttcagaatttgctgccatcatcatc

SEQ ID NO: 1322 - RNA, 25 nt, Homo sapiens
  source 1..25: mol_type = genomic RNA
aagaaagagtcttgctttgtcgccc

SEQ ID NO: 1323 - RNA, 22 nt, Homo sapiens
  source 1..22: mol_type = genomic RNA
gacagggtctcgttttgtcgcc

SEQ ID NO: 1324 - RNA, 25 nt, Homo sapiens
  source 1..25: mol_type = genomic RNA
actgcagcctcaacctcatgggttc

SEQ ID NO: 1325 - RNA, 22 nt, Homo sapiens
  source 1..22: mol_type = genomic RNA
tccacttcctgggttcaagcaa

SEQ ID NO: 1326 - RNA, 19 nt, Homo sapiens
  source 1..19: mol_type = genomic RNA
cactgcaacctccatctcc

SEQ ID NO: 1327 - RNA, 21 nt, Homo sapiens
  source 1..21: mol_type = genomic RNA
ctcaggctggagtgcagtggt

SEQ ID NO: 1328 - RNA, 22 nt, Homo sapiens
  source 1..22: mol_type = genomic RNA
acttactgcagcctcaaccacc

SEQ ID NO: 1329 - RNA, 22 nt, Homo sapiens
  source 1..22: mol_type = genomic RNA
agccaagctcagacggatccga

SEQ ID NO: 1330 - RNA, 17 nt, Homo sapiens
  source 1..17: mol_type = genomic RNA
gacagcctctcccccac

SEQ ID NO: 1331 - RNA, 22 nt, Homo sapiens
  source 1..22: mol_type = genomic RNA
atcagagccctctgagcttcag

SEQ ID NO: 1332 - RNA, 20 nt, Homo sapiens
  source 1..20: mol_type = genomic RNA
tgtctccacagggctcttta

SEQ ID NO: 1333 - RNA, 22 nt, Homo sapiens
  source 1..22: mol_type = genomic RNA
aaaatacatatatatctacgta

SEQ ID NO: 1334 - RNA, 22 nt, Homo sapiens
  source 1..22: mol_type = genomic RNA
gctcttttcattaatgtagaca

SEQ ID NO: 1335 - RNA, 22 nt, Homo sapiens
  source 1..22: mol_type = genomic RNA
atagatgatatgcacagtacta

SEQ ID NO: 1336 - RNA, 17 nt, Homo sapiens
  source 1..17: mol_type = genomic RNA
agaaagaagcaatatga

SEQ ID NO: 1337 - RNA, 21 nt, Homo sapiens
  source 1..21: mol_type = genomic RNA
aaagagaccggttcactgtga

SEQ ID NO: 1338 - RNA, 17 nt, Homo sapiens
  source 1..17: mol_type = genomic RNA
gggagaggaggaggcga

SEQ ID NO: 1339 - RNA, 20 nt, Homo sapiens
  source 1..20: mol_type = genomic RNA
aagcagaaaaaggcaaacga

SEQ ID NO: 1340 - RNA, 22 nt, Homo sapiens
  source 1..22: mol_type = genomic RNA
agaaagcgctttcctttgtaga

SEQ ID NO: 1341 - RNA, 22 nt, Homo sapiens
  source 1..22: mol_type = genomic RNA
gaaaagccagggtctgtataga

SEQ ID NO: 1342 - RNA, 22 nt, Homo sapiens
  source 1..22: mol_type = genomic RNA
aggtctcactttgttgcccaga

SEQ ID NO: 1343 - RNA, 21 nt, Homo sapiens
  source 1..21: mol_type = genomic RNA
cctgggcaacaaagtgagatc

SEQ ID NO: 1344 - RNA, 21 nt, Homo sapiens
  source 1..21: mol_type = genomic RNA
agggctcatcttggtcctgca

SEQ ID NO: 1345 - RNA, 22 nt, Homo sapiens
  source 1..22: mol_type = genomic RNA
gactcgaaccactgatccagca

SEQ ID NO: 1346 - RNA, 21 nt, Homo sapiens
  source 1..21: mol_type = genomic RNA
tctccagatcagggcagtcca

SEQ ID NO: 1347 - RNA, 23 nt, Homo sapiens
  source 1..23: mol_type = genomic RNA
aaaatgcagattcctggactcca

SEQ ID NO: 1348 - RNA, 19 nt, Homo sapiens
  source 1..19: mol_type = genomic RNA
tccctgatccaaaaatcca

SEQ ID NO: 1349 - RNA, 24 nt, Homo sapiens
  source 1..24: mol_type = genomic RNA
actgctggtcttcagtcagggcca

SEQ ID NO: 1350 - RNA, 22 nt, Homo sapiens
  source 1..22: mol_type = genomic RNA
atactttttggggtaagggctt

SEQ ID NO: 1351 - RNA, 20 nt, Homo sapiens
  source 1..20: mol_type = genomic RNA
gaacgggagccggggcgcga

SEQ ID NO: 1352 - RNA, 22 nt, Homo sapiens
  source 1..22: mol_type = genomic RNA
atgctttttggggtaagggctt

SEQ ID NO: 1353 - RNA, 25 nt, Homo sapiens
  source 1..25: mol_type = genomic RNA
cagcgtctgccggaacccgttccca

SEQ ID NO: 1354 - RNA, 22 nt, Homo sapiens
  source 1..22: mol_type = genomic RNA
gcacaaatctccagaccaccca

SEQ ID NO: 1355 - RNA, 22 nt, Homo sapiens
  source 1..22: mol_type = genomic RNA
agacaacaatgccaacctcaca

SEQ ID NO: 1356 - RNA, 21 nt, Homo sapiens
  source 1..21: mol_type = genomic RNA
tcacccagatctgcggcctaa

SEQ ID NO: 1357 - RNA, 22 nt, Homo sapiens
  source 1..22: mol_type = genomic RNA
ttgcccagatccgtggcctatt

SEQ ID NO: 1358 - RNA, 21 nt, Homo sapiens
  source 1..21: mol_type = genomic RNA
attaggccgcagatctgggtg

SEQ ID NO: 1359 - RNA, 21 nt, Homo sapiens
  source 1..21: mol_type = genomic RNA
gcaagcccagaccgcaaaaag

SEQ ID NO: 1360 - RNA, 22 nt, Homo sapiens
  source 1..22: mol_type = genomic RNA
ggagatggagccagggccctaa

SEQ ID NO: 1361 - RNA, 17 nt, Homo sapiens
  source 1..17: mol_type = genomic RNA
cacctgaattacttgaa

SEQ ID NO: 1362 - RNA, 22 nt, Homo sapiens
  source 1..22: mol_type = genomic RNA
tacatctggacagccgaatgaa

SEQ ID NO: 1363 - RNA, 22 nt, Homo sapiens
  source 1..22: mol_type = genomic RNA
tccctcacacagaattccagaa

SEQ ID NO: 1364 - RNA, 24 nt, Homo sapiens
  source 1..24: mol_type = genomic RNA
gaagtcactcccaggcagctgcaa

SEQ ID NO: 1365 - RNA, 21 nt, Homo sapiens
  source 1..21: mol_type = genomic RNA
tttagcataagtatgtcccaa

SEQ ID NO: 1366 - RNA, 22 nt, Homo sapiens
  source 1..22: mol_type = genomic RNA
agagcaagaccccgtctctaaa

SEQ ID NO: 1367 - RNA, 22 nt, Homo sapiens
  source 1..22: mol_type = genomic RNA
ggggttcgaggctacagtgaga

SEQ ID NO: 1368 - RNA, 22 nt, Homo sapiens
  source 1..22: mol_type = genomic RNA
cacatctcactgtagcctcaaa

SEQ ID NO: 1369 - RNA, 22 nt, Homo sapiens
  source 1..22: mol_type = genomic RNA
tctctcccattagagttgaaaa

SEQ ID NO: 1370 - RNA, 18 nt, Homo sapiens
  source 1..18: mol_type = genomic RNA
caccaccagagccaacgt

SEQ ID NO: 1371 - RNA, 22 nt, Homo sapiens
  source 1..22: mol_type = genomic RNA
tggacgtttgcaggggaggtgg

SEQ ID NO: 1372 - RNA, 22 nt, Homo sapiens
  source 1..22: mol_type = genomic RNA
cacgaccgacgccacgccgagt

SEQ ID NO: 1373 - RNA, 21 nt, Homo sapiens
  source 1..21: mol_type = genomic RNA
agccggtcgaggtccggtcga

SEQ ID NO: 1374 - RNA, 22 nt, Homo sapiens
  source 1..22: mol_type = genomic RNA
atgcccttttaacattgcactg

SEQ ID NO: 1375 - RNA, 22 nt, Homo sapiens
  source 1..22: mol_type = genomic RNA
gcagacagtagcacaatgtgaa

SEQ ID NO: 1376 - RNA, 22 nt, Homo sapiens
  source 1..22: mol_type = genomic RNA
atgccctttcatcattgcactg

SEQ ID NO: 1377 - RNA, 21 nt, Homo sapiens
  source 1..21: mol_type = genomic RNA
gtagtgcaacagggaaagagt

SEQ ID NO: 1378 - RNA, 18 nt, Homo sapiens
  source 1..18: mol_type = genomic RNA
atcacattcacctccctg

SEQ ID NO: 1379 - RNA, 19 nt, Homo sapiens
  source 1..19: mol_type = genomic RNA
cagcatcagcagcatcatc

SEQ ID NO: 1380 - RNA, 22 nt, Homo sapiens
  source 1..22: mol_type = genomic RNA
agaaaatgcccctcagttttga

SEQ ID NO: 1381 - RNA, 22 nt, Homo sapiens
  source 1..22: mol_type = genomic RNA
cgaccatggctgtagactgtta

SEQ ID NO: 1382 - RNA, 24 nt, Homo sapiens
  source 1..24: mol_type = genomic RNA
gaaagtgcatagaattctgtctgg

SEQ ID NO: 1383 - RNA, 22 nt, Homo sapiens
  source 1..22: mol_type = genomic RNA
agtaacaatcgaaagccacggt

SEQ ID NO: 1384 - RNA, 22 nt, Homo sapiens
  source 1..22: mol_type = genomic RNA
cagctggttgaaggggaccaaa

SEQ ID NO: 1385 - RNA, 22 nt, Homo sapiens
  source 1..22: mol_type = genomic RNA
tagctggttgaaggggaccaaa

SEQ ID NO: 1386 - RNA, 22 nt, Homo sapiens
  source 1..22: mol_type = genomic RNA
cccctctggtcaaccagtcaca

SEQ ID NO: 1387 - RNA, 22 nt, Homo sapiens
  source 1..22: mol_type = genomic RNA
gcgagagtgcgggccccaggag

SEQ ID NO: 1388 - RNA, 22 nt, Homo sapiens
  source 1..22: mol_type = genomic RNA
cgccacggctccaatccctata

SEQ ID NO: 1389 - RNA, 23 nt, Homo sapiens
  source 1..23: mol_type = genomic RNA
tcacataggaataaaaagccata

SEQ ID NO: 1390 - RNA, 22 nt, Homo sapiens
  source 1..22: mol_type = genomic RNA
cccatggcttttagccctacat

SEQ ID NO: 1391 - RNA, 23 nt, Homo sapiens
  source 1..23: mol_type = genomic RNA
tcacataggaatgaaaagccata

SEQ ID NO: 1392 - RNA, 22 nt, Homo sapiens
  source 1..22: mol_type = genomic RNA
agactcatttgagacgatgatg

SEQ ID NO: 1393 - RNA, 23 nt, Homo sapiens
  source 1..23: mol_type = genomic RNA
tccatcatcaaaacaaatggagt

SEQ ID NO: 1394 - RNA, 23 nt, Homo sapiens
  source 1..23: mol_type = genomic RNA
ctacgcgtattcttaagcaataa

SEQ ID NO: 1395 - RNA, 22 nt, Homo sapiens
  source 1..22: mol_type = genomic RNA
ggccctggtgttgtgaagtagc

SEQ ID NO: 1396 - RNA, 22 nt, Homo sapiens
  source 1..22: mol_type = genomic RNA
aaccctggtgtcgtgaaatagc

SEQ ID NO: 1397 - RNA, 23 nt, Homo sapiens
  source 1..23: mol_type = genomic RNA
cggcctgattcacaacaccagct

SEQ ID NO: 1398 - RNA, 23 nt, Homo sapiens
  source 1..23: mol_type = genomic RNA
actccaacagggccgcgtctcca

SEQ ID NO: 1399 - RNA, 23 nt, Homo sapiens
  source 1..23: mol_type = genomic RNA
actggagacacgtgcactgtaga

SEQ ID NO: 1400 - RNA, 21 nt, Homo sapiens
  source 1..21: mol_type = genomic RNA
ccgtggttctaccctgtggta

SEQ ID NO: 1401 - RNA, 22 nt, Homo sapiens
  source 1..22: mol_type = genomic RNA
ctaccatagggtaaaaccactg

SEQ ID NO: 1402 - RNA, 22 nt, Homo sapiens
  source 1..22: mol_type = genomic RNA
ccatctttaccagacagtgtta

SEQ ID NO: 1403 - RNA, 22 nt, Homo sapiens
  source 1..22: mol_type = genomic RNA
tccaacactgtactggaagatg

SEQ ID NO: 1404 - RNA, 23 nt, Homo sapiens
  source 1..23: mol_type = genomic RNA
tccataaagtaggaaacactaca

SEQ ID NO: 1405 - RNA, 21 nt, Homo sapiens
  source 1..21: mol_type = genomic RNA
agtagtgctttctactttatg

SEQ ID NO: 1406 - RNA, 21 nt, Homo sapiens
  source 1..21: mol_type = genomic RNA
gagctacagtgcttcatctca

SEQ ID NO: 1407 - RNA, 22 nt, Homo sapiens
  source 1..22: mol_type = genomic RNA
accagagatgcagcactgcacc

SEQ ID NO: 1408 - RNA, 20 nt, Homo sapiens
  source 1..20: mol_type = genomic RNA
agtacatcatctatactgta

SEQ ID NO: 1409 - RNA, 22 nt, Homo sapiens
  source 1..22: mol_type = genomic RNA
cttacagtatatgatgatatcc

SEQ ID NO: 1410 - RNA, 22 nt, Homo sapiens
  source 1..22: mol_type = genomic RNA
agaacagtatttccaggaatcc

SEQ ID NO: 1411 - RNA, 23 nt, Homo sapiens
  source 1..23: mol_type = genomic RNA
agggattcctgggaaaactggac

SEQ ID NO: 1412 - RNA, 21 nt, Homo sapiens
  source 1..21: mol_type = genomic RNA
cagcgaaacaggcaaacggag

SEQ ID NO: 1413 - RNA, 22 nt, Homo sapiens
  source 1..22: mol_type = genomic RNA
ggagcccgcgccccgcgccgag

SEQ ID NO: 1414 - RNA, 22 nt, Homo sapiens
  source 1..22: mol_type = genomic RNA
ctgaagaactgaatttcagagg

SEQ ID NO: 1415 - RNA, 22 nt, Homo sapiens
  source 1..22: mol_type = genomic RNA
aacccatggaattcagttctca

SEQ ID NO: 1416 - RNA, 22 nt, Homo sapiens
  source 1..22: mol_type = genomic RNA
ccagaactgagtccacagggca

SEQ ID NO: 1417 - RNA, 22 nt, Homo sapiens
  source 1..22: mol_type = genomic RNA
agcctatggaattcagttctca

SEQ ID NO: 1418 - RNA, 21 nt, Homo sapiens
  source 1..21: mol_type = genomic RNA
cggggtgcacgggcggagggc

SEQ ID NO: 1419 - RNA, 22 nt, Homo sapiens
  source 1..22: mol_type = genomic RNA
acacctggctccacacgcgggc

SEQ ID NO: 1420 - RNA, 20 nt, Homo sapiens
  source 1..20: mol_type = genomic RNA
gcagaagcatttccacacac

SEQ ID NO: 1421 - RNA, 22 nt, Homo sapiens
  source 1..22: mol_type = genomic RNA
tagcagaagcatttccgcacac

SEQ ID NO: 1422 - RNA, 22 nt, Homo sapiens
  source 1..22: mol_type = genomic RNA
acaaagttctgtagtgcactga

SEQ ID NO: 1423 - RNA, 22 nt, Homo sapiens
  source 1..22: mol_type = genomic RNA
agtcggagtgtctcagaacttt

SEQ ID NO: 1424 - RNA, 22 nt, Homo sapiens
  source 1..22: mol_type = genomic RNA
acaaagttctgtgatgcactga

SEQ ID NO: 1425 - RNA, 22 nt, Homo sapiens
  source 1..22: mol_type = genomic RNA
gcctgagtgtataacagaactt

SEQ ID NO: 1426 - RNA, 21 nt, Homo sapiens
  source 1..21: mol_type = genomic RNA
gcacagcccccgtccctccct

SEQ ID NO: 1427 - RNA, 23 nt, Homo sapiens
  source 1..23: mol_type = genomic RNA
gggagtgaagacacggagccaga

SEQ ID NO: 1428 - RNA, 22 nt, Homo sapiens
  source 1..22: mol_type = genomic RNA
ctgtcccccaggcctgtaccag

SEQ ID NO: 1429 - RNA, 22 nt, Homo sapiens
  source 1..22: mol_type = genomic RNA
cactggtacaagggttgggaga

SEQ ID NO: 1430 - RNA, 21 nt, Homo sapiens
  source 1..21: mol_type = genomic RNA
cctcaaggagcttcagtctag

SEQ ID NO: 1431 - RNA, 21 nt, Homo sapiens
  source 1..21: mol_type = genomic RNA
actagactgtgagctcctcga

SEQ ID NO: 1432 - RNA, 18 nt, Homo sapiens
  source 1..18: mol_type = genomic RNA
agactgtgagctcctcga

SEQ ID NO: 1433 - RNA, 21 nt, Homo sapiens
  source 1..21: mol_type = genomic RNA
ccaagttctgtcatgcactga

SEQ ID NO: 1434 - RNA, 22 nt, Homo sapiens
  source 1..22: mol_type = genomic RNA
gatcacttttgtgactatgcaa

SEQ ID NO: 1435 - RNA, 22 nt, Homo sapiens
  source 1..22: mol_type = genomic RNA
acaactgtaactagacggtttt

SEQ ID NO: 1436 - RNA, 23 nt, Homo sapiens
  source 1..23: mol_type = genomic RNA
aggaacagcagcagcccgggccg

SEQ ID NO: 1437 - RNA, 21 nt, Homo sapiens
  source 1..21: mol_type = genomic RNA
gggcatctgggacgcgcagga

SEQ ID NO: 1438 - RNA, 22 nt, Homo sapiens
  source 1..22: mol_type = genomic RNA
aataggtcaaccgtgtatgatt

SEQ ID NO: 1439 - RNA, 22 nt, Homo sapiens
  source 1..22: mol_type = genomic RNA
cgaaggcaacacggataaccta

SEQ ID NO: 1440 - RNA, 22 nt, Homo sapiens
  source 1..22: mol_type = genomic RNA
tgttaatgctaatatgtaggag

SEQ ID NO: 1441 - RNA, 23 nt, Homo sapiens
  source 1..23: mol_type = genomic RNA
acccctatcacgattagcattaa

SEQ ID NO: 1442 - RNA, 20 nt, Homo sapiens
  source 1..20: mol_type = genomic RNA
cccaacccagcccagcccaa

SEQ ID NO: 1443 - RNA, 22 nt, Homo sapiens
  source 1..22: mol_type = genomic RNA
tgaggcagcacaatatggcctg

SEQ ID NO: 1444 - RNA, 22 nt, Homo sapiens
  source 1..22: mol_type = genomic RNA
cacaaaccattatgtgctgcta

SEQ ID NO: 1445 - RNA, 22 nt, Homo sapiens
  source 1..22: mol_type = genomic RNA
tagagcagcaaataatgattcg

SEQ ID NO: 1446 - RNA, 22 nt, Homo sapiens
  source 1..22: mol_type = genomic RNA
tgtaaaccatgatgtgctgcta

SEQ ID NO: 1447 - RNA, 22 nt, Homo sapiens
  source 1..22: mol_type = genomic RNA
tcagcagcacagttaatactgg

SEQ ID NO: 1448 - RNA, 22 nt, Homo sapiens
  source 1..22: mol_type = genomic RNA
taaagcagcacagtaatattgg

SEQ ID NO: 1449 - RNA, 22 nt, Homo sapiens
  source 1..22: mol_type = genomic RNA
cgccaatatttacgtgctgcta

SEQ ID NO: 1450 - RNA, 22 nt, Homo sapiens
  source 1..22: mol_type = genomic RNA
ctacaagtgccttcactgcagt

SEQ ID NO: 1451 - RNA, 23 nt, Homo sapiens
  source 1..23: mol_type = genomic RNA
ctacctgcactgtaagcactttg

SEQ ID NO: 1452 - RNA, 22 nt, Homo sapiens
  source 1..22: mol_type = genomic RNA
ggtacagtcaacggtcagtggt

SEQ ID NO: 1453 - RNA, 22 nt, Homo sapiens
  source 1..22: mol_type = genomic RNA
ggtacaatcaacggtcgatggt

SEQ ID NO: 1454 - RNA, 23 nt, Homo sapiens
  source 1..23: mol_type = genomic RNA
actcaccgacagcgttgaatgtt

SEQ ID NO: 1455 - RNA, 21 nt, Homo sapiens
  source 1..21: mol_type = genomic RNA
ttgcattcattgttcagtgag

SEQ ID NO: 1456 - RNA, 23 nt, Homo sapiens
  source 1..23: mol_type = genomic RNA
acccaccgacagcaatgaatgtt

SEQ ID NO: 1457 - RNA, 22 nt, Homo sapiens
  source 1..22: mol_type = genomic RNA
gtccactcaacggtcgatggtt

SEQ ID NO: 1458 - RNA, 22 nt, Homo sapiens
  source 1..22: mol_type = genomic RNA
actcaccgacaggttgaatgtt

SEQ ID NO: 1459 - RNA, 23 nt, Homo sapiens
  source 1..23: mol_type = genomic RNA
acccaccgacaacaatgaatgtt

SEQ ID NO: 1460 - RNA, 21 nt, Homo sapiens
  source 1..21: mol_type = genomic RNA
tagttggcaagtctagaacca

SEQ ID NO: 1461 - RNA, 18 nt, Homo sapiens
  source 1..18: mol_type = genomic RNA
ggagaggagggcactgga

SEQ ID NO: 1462 - RNA, 24 nt, Homo sapiens
  source 1..24: mol_type = genomic RNA
agtgtgagttctaccattgccaaa

SEQ ID NO: 1463 - RNA, 18 nt, Homo sapiens
  source 1..18: mol_type = genomic RNA
attcaatctactgcctca

SEQ ID NO: 1464 - RNA, 22 nt, Homo sapiens
  source 1..22: mol_type = genomic RNA
ttatggcccttcggtaattcac

SEQ ID NO: 1465 - RNA, 22 nt, Homo sapiens
  source 1..22: mol_type = genomic RNA
agtgaattctaccagtgccata

SEQ ID NO: 1466 - RNA, 22 nt, Homo sapiens
  source 1..22: mol_type = genomic RNA
acccttatcagttctccgtcca

SEQ ID NO: 1467 - RNA, 22 nt, Homo sapiens
  source 1..22: mol_type = genomic RNA
gaccagaggaaagccagcccct

SEQ ID NO: 1468 - RNA, 22 nt, Homo sapiens
  source 1..22: mol_type = genomic RNA
tcaggaactgcctttctctcca

SEQ ID NO: 1469 - RNA, 22 nt, Homo sapiens
  source 1..22: mol_type = genomic RNA
cccaaaaaattcacctttgggc

SEQ ID NO: 1470 - RNA, 22 nt, Homo sapiens
  source 1..22: mol_type = genomic RNA
agcccaaaaggagaattctttg

SEQ ID NO: 1471 - RNA, 22 nt, Homo sapiens
  source 1..22: mol_type = genomic RNA
ccggctgcaacacaagacacga

SEQ ID NO: 1472 - RNA, 22 nt, Homo sapiens
  source 1..22: mol_type = genomic RNA
gcccgggtcctgtgttgtagcc

SEQ ID NO: 1473 - RNA, 21 nt, Homo sapiens
  source 1..21: mol_type = genomic RNA
tgcaaaccctgcatgtgggag

SEQ ID NO: 1474 - RNA, 21 nt, Homo sapiens
  source 1..21: mol_type = genomic RNA
ccctccaccatgcaagggatg

SEQ ID NO: 1475 - RNA, 23 nt, Homo sapiens
  source 1..23: mol_type = genomic RNA
ccagaaggagcacttagggcagt

SEQ ID NO: 1476 - RNA, 23 nt, Homo sapiens
  source 1..23: mol_type = genomic RNA
ctatctgcactagatgcacctta

SEQ ID NO: 1477 - RNA, 22 nt, Homo sapiens
  source 1..22: mol_type = genomic RNA
gccagaaggggcatttagggca

SEQ ID NO: 1478 - RNA, 23 nt, Homo sapiens
  source 1..23: mol_type = genomic RNA
ctaactgcactagatgcacctta

SEQ ID NO: 1479 - RNA, 21 nt, Homo sapiens
  source 1..21: mol_type = genomic RNA
gaccaatcgccgtccccgccg

SEQ ID NO: 1480 - RNA, 22 nt, Homo sapiens
  source 1..22: mol_type = genomic RNA
cggtgagcacccggcccctgcg

SEQ ID NO: 1481 - RNA, 21 nt, Homo sapiens
  source 1..21: mol_type = genomic RNA
cagggcaggcaccggcactca

SEQ ID NO: 1482 - RNA, 22 nt, Homo sapiens
  source 1..22: mol_type = genomic RNA
acctaatatatcaaacatatca

SEQ ID NO: 1483 - RNA, 21 nt, Homo sapiens
  source 1..21: mol_type = genomic RNA
aacccaatatcaaacatatca

SEQ ID NO: 1484 - RNA, 21 nt, Homo sapiens
  source 1..21: mol_type = genomic RNA
aggcggcaggcacaggactgg

SEQ ID NO: 1485 - RNA, 20 nt, Homo sapiens
  source 1..20: mol_type = genomic RNA
ggagaccacaatgcctggtg

SEQ ID NO: 1486 - RNA, 23 nt, Homo sapiens
  source 1..23: mol_type = genomic RNA
cccaacagacatggcggtactca

SEQ ID NO: 1487 - RNA, 22 nt, Homo sapiens
  source 1..22: mol_type = genomic RNA
ttcacactgcatgctctgggta

SEQ ID NO: 1488 - RNA, 22 nt, Homo sapiens
  source 1..22: mol_type = genomic RNA
tggcagcagcggagggggcaga

SEQ ID NO: 1489 - RNA, 22 nt, Homo sapiens
  source 1..22: mol_type = genomic RNA
ggggacgaaatccaagcgcagc

SEQ ID NO: 1490 - RNA, 22 nt, Homo sapiens
  source 1..22: mol_type = genomic RNA
cctcccagtgcgggacccctcc

SEQ ID NO: 1491 - RNA, 22 nt, Homo sapiens
  source 1..22: mol_type = genomic RNA
cagaagtgggccgggcacaggg

SEQ ID NO: 1492 - RNA, 20 nt, Homo sapiens
  source 1..20: mol_type = genomic RNA
cccgccgcgtcgccctgggg

SEQ ID NO: 1493 - RNA, 22 nt, Homo sapiens
  source 1..22: mol_type = genomic RNA
ggcccgggcagcaaggcaaggt

SEQ ID NO: 1494 - RNA, 23 nt, Homo sapiens
  source 1..23: mol_type = genomic RNA
cagctgcttttgggattccgttg

SEQ ID NO: 1495 - RNA, 22 nt, Homo sapiens
  source 1..22: mol_type = genomic RNA
ctgtgacctatggaattggcag

SEQ ID NO: 1496 - RNA, 21 nt, Homo sapiens
  source 1..21: mol_type = genomic RNA
ggctgtcaattcataggtcag

SEQ ID NO: 1497 - RNA, 22 nt, Homo sapiens
  source 1..22: mol_type = genomic RNA
actgggactttgtaggccagtt

SEQ ID NO: 1498 - RNA, 22 nt, Homo sapiens
  source 1..22: mol_type = genomic RNA
tcatctcgcccgcaaagaccca

SEQ ID NO: 1499 - RNA, 22 nt, Homo sapiens
  source 1..22: mol_type = genomic RNA
agcgggactttgagggccagtt

SEQ ID NO: 1500 - RNA, 22 nt, Homo sapiens
  source 1..22: mol_type = genomic RNA
tcatctcgccctcaaaaccccg

SEQ ID NO: 1501 - RNA, 22 nt, Homo sapiens
  source 1..22: mol_type = genomic RNA
cagataacagcagccccactgg

SEQ ID NO: 1502 - RNA, 22 nt, Homo sapiens
  source 1..22: mol_type = genomic RNA
tccacatggagttgctgttaca

SEQ ID NO: 1503 - RNA, 22 nt, Homo sapiens
  source 1..22: mol_type = genomic RNA
ggagcagcacagccaatattgg

SEQ ID NO: 1504 - RNA, 21 nt, Homo sapiens
  source 1..21: mol_type = genomic RNA
gccaatatttctgtgctgcta

SEQ ID NO: 1505 - RNA, 22 nt, Homo sapiens
  source 1..22: mol_type = genomic RNA
ctcaggcagtttcttgttgccg

SEQ ID NO: 1506 - RNA, 22 nt, Homo sapiens
  source 1..22: mol_type = genomic RNA
cccaacaacatgaaactaccta

SEQ ID NO: 1507 - RNA, 22 nt, Homo sapiens
  source 1..22: mol_type = genomic RNA
gaaggcagtgtcgtgctgtcga

SEQ ID NO: 1508 - RNA, 22 nt, Homo sapiens
  source 1..22: mol_type = genomic RNA
cccaacaacaggaaactaccta

SEQ ID NO: 1509 - RNA, 22 nt, Homo sapiens
  source 1..22: mol_type = genomic RNA
tgagccactgtgcctggcctga

SEQ ID NO: 1510 - RNA, 19 nt, Homo sapiens
  source 1..19: mol_type = genomic RNA
tatgctacctttgcacggt

SEQ ID NO: 1511 - RNA, 22 nt, Homo sapiens
  source 1..22: mol_type = genomic RNA
gctgggtggagaaggtggtgaa

SEQ ID NO: 1512 - RNA, 23 nt, Homo sapiens
  source 1..23: mol_type = genomic RNA
cctcccactgccctctctacccg

SEQ ID NO: 1513 - RNA, 20 nt, Homo sapiens
  source 1..20: mol_type = genomic RNA
acagcaaggagggcaggagg

SEQ ID NO: 1514 - RNA, 22 nt, Homo sapiens
  source 1..22: mol_type = genomic RNA
gaacctatctcccctctggacc

SEQ ID NO: 1515 - RNA, 22 nt, Homo sapiens
  source 1..22: mol_type = genomic RNA
taaccaatgtgcagactactgt

SEQ ID NO: 1516 - RNA, 23 nt, Homo sapiens
  source 1..23: mol_type = genomic RNA
gaacaggtagtctgaacactggg

SEQ ID NO: 1517 - RNA, 22 nt, Homo sapiens
  source 1..22: mol_type = genomic RNA
taaccaatgtgcagactactgt

SEQ ID NO: 1518 - RNA, 23 nt, Homo sapiens
  source 1..23: mol_type = genomic RNA
gaacagatagtctaaacactggg

SEQ ID NO: 1519 - RNA, 23 nt, Homo sapiens
  source 1..23: mol_type = genomic RNA
tcagttttgcatagatttgcaca

SEQ ID NO: 1520 - RNA, 22 nt, Homo sapiens
  source 1..22: mol_type = genomic RNA
tgtagtgcaactatgcaaaact

SEQ ID NO: 1521 - RNA, 23 nt, Homo sapiens
  source 1..23: mol_type = genomic RNA
gctggatgcaaacctgcaaaact

SEQ ID NO: 1522 - RNA, 22 nt, Homo sapiens
  source 1..22: mol_type = genomic RNA
tgaaatgcaaacctgcaaaact

SEQ ID NO: 1523 - RNA, 23 nt, Homo sapiens
  source 1..23: mol_type = genomic RNA
tcagttttgcatggatttgcaca

SEQ ID NO: 1524 - RNA, 22 nt, Homo sapiens
  source 1..22: mol_type = genomic RNA
acatcgttaccagacagtgtta

SEQ ID NO: 1525 - RNA, 22 nt, Homo sapiens
  source 1..22: mol_type = genomic RNA
tccagcactgtccggtaagatg

SEQ ID NO: 1526 - RNA, 22 nt, Homo sapiens
  source 1..22: mol_type = genomic RNA
tcatcattaccaggcagtatta

SEQ ID NO: 1527 - RNA, 22 nt, Homo sapiens
  source 1..22: mol_type = genomic RNA
tccaatgctgcccagtaagatg

SEQ ID NO: 1528 - RNA, 23 nt, Homo sapiens
  source 1..23: mol_type = genomic RNA
tccatcattacccggcagtatta

SEQ ID NO: 1529 - RNA, 22 nt, Homo sapiens
  source 1..22: mol_type = genomic RNA
ccaaacactgctgggtaagacg

SEQ ID NO: 1530 - RNA, 20 nt, Homo sapiens
  source 1..20: mol_type = genomic RNA
ttcccatgccctatacctct

SEQ ID NO: 1531 - RNA, 22 nt, Homo sapiens
  source 1..22: mol_type = genomic RNA
caaagaagtatatgcataggaa

SEQ ID NO: 1532 - RNA, 22 nt, Homo sapiens
  source 1..22: mol_type = genomic RNA
ctagtggtcctaaacatttcac

SEQ ID NO: 1533 - RNA, 23 nt, Homo sapiens
  source 1..23: mol_type = genomic RNA
tccagtggttcttaacagttcaa

SEQ ID NO: 1534 - RNA, 22 nt, Homo sapiens
  source 1..22: mol_type = genomic RNA
tgtgaaatgtttaggaccacta

SEQ ID NO: 1535 - RNA, 21 nt, Homo sapiens
  source 1..21: mol_type = genomic RNA
acgtccctttgccttcccagc

SEQ ID NO: 1536 - RNA, 22 nt, Homo sapiens
  source 1..22: mol_type = genomic RNA
aggcataggatgacaaagggaa

SEQ ID NO: 1537 - RNA, 20 nt, Homo sapiens
  source 1..20: mol_type = genomic RNA
acattactgttatcaaaaca

SEQ ID NO: 1538 - RNA, 23 nt, Homo sapiens
  source 1..23: mol_type = genomic RNA
gtaaatagaggtttaattaacac

SEQ ID NO: 1539 - RNA, 21 nt, Homo sapiens
  source 1..21: mol_type = genomic RNA
gaacttcactccactgaaatc

SEQ ID NO: 1540 - RNA, 23 nt, Homo sapiens
  source 1..23: mol_type = genomic RNA
aataaattaaatttatattacag

SEQ ID NO: 1541 - RNA, 22 nt, Homo sapiens
  source 1..22: mol_type = genomic RNA
cagactccggtggaatgaagga

SEQ ID NO: 1542 - RNA, 22 nt, Homo sapiens
  source 1..22: mol_type = genomic RNA
ccacacacttccttacattcca

SEQ ID NO: 1543 - RNA, 22 nt, Homo sapiens
  source 1..22: mol_type = genomic RNA
acaagctttttgctcgtcttat

SEQ ID NO: 1544 - RNA, 22 nt, Homo sapiens
  source 1..22: mol_type = genomic RNA
acaaaccttttgttcgtcttat

SEQ ID NO: 1545 - RNA, 22 nt, Homo sapiens
  source 1..22: mol_type = genomic RNA
ctttaagtgctcataatgcagt

SEQ ID NO: 1546 - RNA, 23 nt, Homo sapiens
  source 1..23: mol_type = genomic RNA
ctacctgcactataagcacttta

SEQ ID NO: 1547 - RNA, 22 nt, Homo sapiens
  source 1..22: mol_type = genomic RNA
ctggaagtgcccatactacagt

SEQ ID NO: 1548 - RNA, 23 nt, Homo sapiens
  source 1..23: mol_type = genomic RNA
ctacctgcactatgagcactttg

SEQ ID NO: 1549 - RNA, 22 nt, Homo sapiens
  source 1..22: mol_type = genomic RNA
tcagccgctgtcacacgcacag

SEQ ID NO: 1550 - RNA, 22 nt, Homo sapiens
  source 1..22: mol_type = genomic RNA
cactcagcggccgtttccccaa

SEQ ID NO: 1551 - RNA, 21 nt, Homo sapiens
  source 1..21: mol_type = genomic RNA
gtgacagagccaagcacaaat

SEQ ID NO: 1552 - RNA, 21 nt, Homo sapiens
  source 1..21: mol_type = genomic RNA
gcacccctttgctgtccctgc

SEQ ID NO: 1553 - RNA, 21 nt, Homo sapiens
  source 1..21: mol_type = genomic RNA
aagtcccttgcttgaggctcg

SEQ ID NO: 1554 - RNA, 22 nt, Homo sapiens
  source 1..22: mol_type = genomic RNA
gaccgcttcaaggaagggacta

SEQ ID NO: 1555 - RNA, 22 nt, Homo sapiens
  source 1..22: mol_type = genomic RNA
ctagcctccatgaattctgatg

SEQ ID NO: 1556 - RNA, 22 nt, Homo sapiens
  source 1..22: mol_type = genomic RNA
tccatcaggagtcatggaagct

SEQ ID NO: 1557 - RNA, 22 nt, Homo sapiens
  source 1..22: mol_type = genomic RNA
aggcgaaggatgacaaagggaa

SEQ ID NO: 1558 - RNA, 21 nt, Homo sapiens
  source 1..21: mol_type = genomic RNA
gggagttcttggcatgggagg

SEQ ID NO: 1559 - RNA, 21 nt, Homo sapiens
  source 1..21: mol_type = genomic RNA
agacctcctatgctaagaacc

SEQ ID NO: 1560 - RNA, 21 nt, Homo sapiens
  source 1..21: mol_type = genomic RNA
ctgtccttggcaaagagaaca

SEQ ID NO: 1561 - RNA, 21 nt, Homo sapiens
  source 1..21: mol_type = genomic RNA
ggccgtgactggagactgtta

SEQ ID NO: 1562 - RNA, 23 nt, Homo sapiens
  source 1..23: mol_type = genomic RNA
agtaagcagtctagagccaaggt

SEQ ID NO: 1563 - RNA, 21 nt, Homo sapiens
  source 1..21: mol_type = genomic RNA
acagcccatcgactggtgttg

SEQ ID NO: 1564 - RNA, 22 nt, Homo sapiens
  source 1..22: mol_type = genomic RNA
actgcctgtctgtgcctgctgt

SEQ ID NO: 1565 - RNA, 22 nt, Homo sapiens
  source 1..22: mol_type = genomic RNA
gcacagcaagtgtagacaggca

SEQ ID NO: 1566 - RNA, 21 nt, Homo sapiens
  source 1..21: mol_type = genomic RNA
gtctgtcaattcataggtcat

SEQ ID NO: 1567 - RNA, 22 nt, Homo sapiens
  source 1..22: mol_type = genomic RNA
tcaacatcagtctgataagcta

SEQ ID NO: 1568 - RNA, 22 nt, Homo sapiens
  source 1..22: mol_type = genomic RNA
ataatcccagagaccactgtga

SEQ ID NO: 1569 - RNA, 22 nt, Homo sapiens
  source 1..22: mol_type = genomic RNA
tcacagttgccagctgagatta

SEQ ID NO: 1570 - RNA, 22 nt, Homo sapiens
  source 1..22: mol_type = genomic RNA
tcacatttgcctgcagagattt

SEQ ID NO: 1571 - RNA, 23 nt, Homo sapiens
  source 1..23: mol_type = genomic RNA
tccaatcagttcctgatgcagta

SEQ ID NO: 1572 - RNA, 22 nt, Homo sapiens
  source 1..22: mol_type = genomic RNA
ccatggtgcttgacggaaccat

SEQ ID NO: 1573 - RNA, 22 nt, Homo sapiens
  source 1..22: mol_type = genomic RNA
cgcggtgcttgacagaaccatg

SEQ ID NO: 1574 - RNA, 21 nt, Homo sapiens
  source 1..21: mol_type = genomic RNA
acatggttagatcaagcacaa

SEQ ID NO: 1575 - RNA, 22 nt, Homo sapiens
  source 1..22: mol_type = genomic RNA
cgggacgtccagactcaactct

SEQ ID NO: 1576 - RNA, 22 nt, Homo sapiens
  source 1..22: mol_type = genomic RNA
acagatgtccagccacaattct

SEQ ID NO: 1577 - RNA, 21 nt, Homo sapiens
  source 1..21: mol_type = genomic RNA
agaattgcgtttggacaatca

SEQ ID NO: 1578 - RNA, 23 nt, Homo sapiens
  source 1..23: mol_type = genomic RNA
gaaacccagcagacaatgtagct

SEQ ID NO: 1579 - RNA, 22 nt, Homo sapiens
  source 1..22: mol_type = genomic RNA
aaatctacattgtatgccaggt

SEQ ID NO: 1580 - RNA, 21 nt, Homo sapiens
  source 1..21: mol_type = genomic RNA
acccagtagccagatgtagct

SEQ ID NO: 1581 - RNA, 22 nt, Homo sapiens
  source 1..22: mol_type = genomic RNA
aggatctacactggctactgag

SEQ ID NO: 1582 - RNA, 22 nt, Homo sapiens
  source 1..22: mol_type = genomic RNA
tggggtatttgacaaactgaca

SEQ ID NO: 1583 - RNA, 22 nt, Homo sapiens
  source 1..22: mol_type = genomic RNA
aactcagcttgtcaaatacacg

SEQ ID NO: 1584 - RNA, 22 nt, Homo sapiens
  source 1..22: mol_type = genomic RNA
acagttcttcaactggcagctt

SEQ ID NO: 1585 - RNA, 23 nt, Homo sapiens
  source 1..23: mol_type = genomic RNA
tgtagtcactagggcaccatttt

SEQ ID NO: 1586 - RNA, 21 nt, Homo sapiens
  source 1..21: mol_type = genomic RNA
aacggaaccactagtgacttg

SEQ ID NO: 1587 - RNA, 22 nt, Homo sapiens
  source 1..22: mol_type = genomic RNA
taaagcttgccactgaagaact

SEQ ID NO: 1588 - RNA, 22 nt, Homo sapiens
  source 1..22: mol_type = genomic RNA
cctcgcctctgacacttgcaga

SEQ ID NO: 1589 - RNA, 21 nt, Homo sapiens
  source 1..21: mol_type = genomic RNA
gagccaggcagggcgctgtca

SEQ ID NO: 1590 - RNA, 24 nt, Homo sapiens
  source 1..24: mol_type = genomic RNA
gactggcagcgctcagcccgcgct

SEQ ID NO: 1591 - RNA, 22 nt, Homo sapiens
  source 1..22: mol_type = genomic RNA
ccaggcaacacacactgctctc

SEQ ID NO: 1592 - RNA, 22 nt, Homo sapiens
  source 1..22: mol_type = genomic RNA
atctccaaacagcaaggacaat

SEQ ID NO: 1593 - RNA, 21 nt, Homo sapiens
  source 1..21: mol_type = genomic RNA
ttgtccattgtatctggggat

SEQ ID NO: 1594 - RNA, 20 nt, Homo sapiens
  source 1..20: mol_type = genomic RNA
cacctctcacccccatccta

SEQ ID NO: 1595 - RNA, 21 nt, Homo sapiens
  source 1..21: mol_type = genomic RNA
ggaaatccctggcaatgtgat

SEQ ID NO: 1596 - RNA, 22 nt, Homo sapiens
  source 1..22: mol_type = genomic RNA
aaatcccatccccaggaacccc

SEQ ID NO: 1597 - RNA, 21 nt, Homo sapiens
  source 1..21: mol_type = genomic RNA
ggtaatccctggcaatgtgat

SEQ ID NO: 1598 - RNA, 22 nt, Homo sapiens
  source 1..22: mol_type = genomic RNA
aaatcagcatgccaggaaccca

SEQ ID NO: 1599 - RNA, 22 nt, Homo sapiens
  source 1..22: mol_type = genomic RNA
gggtaatcactggcaatgtgat

SEQ ID NO: 1600 - RNA, 22 nt, Homo sapiens
  source 1..22: mol_type = genomic RNA
actgatatcagctcagtaggca

SEQ ID NO: 1601 - RNA, 22 nt, Homo sapiens
  source 1..22: mol_type = genomic RNA
ctgtgtttcagctcagtaggca

SEQ ID NO: 1602 - RNA, 22 nt, Homo sapiens
  source 1..22: mol_type = genomic RNA
ctgttcctgctgaactgagcca

SEQ ID NO: 1603 - RNA, 22 nt, Homo sapiens
  source 1..22: mol_type = genomic RNA
cctgagcctctctgcctctgct

SEQ ID NO: 1604 - RNA, 23 nt, Homo sapiens
  source 1..23: mol_type = genomic RNA
gagccaaggctaacagagcctca

SEQ ID NO: 1605 - RNA, 22 nt, Homo sapiens
  source 1..22: mol_type = genomic RNA
tcagaccgagacaagtgcaatg

SEQ ID NO: 1606 - RNA, 21 nt, Homo sapiens
  source 1..21: mol_type = genomic RNA
caattgcccaagtctccgcct

SEQ ID NO: 1607 - RNA, 22 nt, Homo sapiens
  source 1..22: mol_type = genomic RNA
gtgctttaccaactccatgata

SEQ ID NO: 1608 - RNA, 22 nt, Homo sapiens
  source 1..22: mol_type = genomic RNA
agtctcctggaggtggtaaaac

SEQ ID NO: 1609 - RNA, 22 nt, Homo sapiens
  source 1..22: mol_type = genomic RNA
ggaagacagcgctgaagaggcg

SEQ ID NO: 1610 - RNA, 23 nt, Homo sapiens
  source 1..23: mol_type = genomic RNA
gacgtctgaacagtcactgcctg

SEQ ID NO: 1611 - RNA, 22 nt, Homo sapiens
  source 1..22: mol_type = genomic RNA
cgtgcaagtaaccaagaatagg

SEQ ID NO: 1612 - RNA, 22 nt, Homo sapiens
  source 1..22: mol_type = genomic RNA
gaaacaagtaatcaagaatagg

SEQ ID NO: 1613 - RNA, 22 nt, Homo sapiens
  source 1..22: mol_type = genomic RNA
agcctatcctggattacttgaa

SEQ ID NO: 1614 - RNA, 22 nt, Homo sapiens
  source 1..22: mol_type = genomic RNA
gagccaagtaatggagaacagg

SEQ ID NO: 1615 - RNA, 21 nt, Homo sapiens
  source 1..21: mol_type = genomic RNA
acctatcctgaattacttgaa

SEQ ID NO: 1616 - RNA, 21 nt, Homo sapiens
  source 1..21: mol_type = genomic RNA
gcggaacttagccactgtgaa

SEQ ID NO: 1617 - RNA, 22 nt, Homo sapiens
  source 1..22: mol_type = genomic RNA
tgctcacaagcagctaagccct

SEQ ID NO: 1618 - RNA, 21 nt, Homo sapiens
  source 1..21: mol_type = genomic RNA
gcagaacttagccactgtgaa

SEQ ID NO: 1619 - RNA, 22 nt, Homo sapiens
  source 1..22: mol_type = genomic RNA
gttcaccaatcagctaagctct

SEQ ID NO: 1620 - RNA, 22 nt, Homo sapiens
  source 1..22: mol_type = genomic RNA
tccaggagctcacaatctagtg

SEQ ID NO: 1621 - RNA, 22 nt, Homo sapiens
  source 1..22: mol_type = genomic RNA
ctcaatagactgtgagctcctt

SEQ ID NO: 1622 - RNA, 19 nt, Homo sapiens
  source 1..19: mol_type = genomic RNA
ccgcccaccgccaggcccc

SEQ ID NO: 1623 - RNA, 21 nt, Homo sapiens
  source 1..21: mol_type = genomic RNA
ccaagagatgttggccctaac

SEQ ID NO: 1624 - RNA, 22 nt, Homo sapiens
  source 1..22: mol_type = genomic RNA
ggagagcctccacccaaccctc

SEQ ID NO: 1625 - RNA, 23 nt, Homo sapiens
  source 1..23: mol_type = genomic RNA
actgattgtccaaacgcaattct

SEQ ID NO: 1626 - RNA, 22 nt, Homo sapiens
  source 1..22: mol_type = genomic RNA
cgagaattgtggctggacatct

SEQ ID NO: 1627 - RNA, 21 nt, Homo sapiens
  source 1..21: mol_type = genomic RNA
acaggattgagggggggccct

SEQ ID NO: 1628 - RNA, 21 nt, Homo sapiens
  source 1..21: mol_type = genomic RNA
catgcacatgcacacatacat

SEQ ID NO: 1629 - RNA, 24 nt, Homo sapiens
  source 1..24: mol_type = genomic RNA
tgggagaacctccctgcttctgct

SEQ ID NO: 1630 - RNA, 22 nt, Homo sapiens
  source 1..22: mol_type = genomic RNA
aagcggtttaccatcccacata

SEQ ID NO: 1631 - RNA, 22 nt, Homo sapiens
  source 1..22: mol_type = genomic RNA
atgtatgtgggacggtaaacca

SEQ ID NO: 1632 - RNA, 22 nt, Homo sapiens
  source 1..22: mol_type = genomic RNA
taaccgatttcagatggtgcta

SEQ ID NO: 1633 - RNA, 22 nt, Homo sapiens
  source 1..22: mol_type = genomic RNA
ctgaacaccaaaagaaatcagt

SEQ ID NO: 1634 - RNA, 24 nt, Homo sapiens
  source 1..24: mol_type = genomic RNA
tctaaaccaccatatgaaaccagc

SEQ ID NO: 1635 - RNA, 22 nt, Homo sapiens
  source 1..22: mol_type = genomic RNA
ctaagccaccatgtgaaaccag

SEQ ID NO: 1636 - RNA, 23 nt, Homo sapiens
  source 1..23: mol_type = genomic RNA
aacactgatttcaaatggtgcta

SEQ ID NO: 1637 - RNA, 22 nt, Homo sapiens
  source 1..22: mol_type = genomic RNA
taaccgatttcaaatggtgcta

SEQ ID NO: 1638 - RNA, 22 nt, Homo sapiens
  source 1..22: mol_type = genomic RNA
gaacaccaggagaaatcggtca

SEQ ID NO: 1639 - RNA, 22 nt, Homo sapiens
  source 1..22: mol_type = genomic RNA
agagagagtctgcccttgtata

SEQ ID NO: 1640 - RNA, 23 nt, Homo sapiens
  source 1..23: mol_type = genomic RNA
gctttgacaatactattgcactg

SEQ ID NO: 1641 - RNA, 22 nt, Homo sapiens
  source 1..22: mol_type = genomic RNA
agtagtgcaataaagtcagagc

SEQ ID NO: 1642 - RNA, 23 nt, Homo sapiens
  source 1..23: mol_type = genomic RNA
gctttgacaatatcattgcactg

SEQ ID NO: 1643 - RNA, 23 nt, Homo sapiens
  source 1..23: mol_type = genomic RNA
tcaccaaaacatggaagcactta

SEQ ID NO: 1644 - RNA, 23 nt, Homo sapiens
  source 1..23: mol_type = genomic RNA
agcaagtacatccacgtttaagt

SEQ ID NO: 1645 - RNA, 23 nt, Homo sapiens
  source 1..23: mol_type = genomic RNA
ctactaaaacatggaagcactta

SEQ ID NO: 1646 - RNA, 22 nt, Homo sapiens
  source 1..22: mol_type = genomic RNA
gaaagcacttccatgttaaagt

SEQ ID NO: 1647 - RNA, 23 nt, Homo sapiens
  source 1..23: mol_type = genomic RNA
ccactgaaacatggaagcactta

SEQ ID NO: 1648 - RNA, 22 nt, Homo sapiens
  source 1..22: mol_type = genomic RNA
cagcaggtacccccatgttaaa

SEQ ID NO: 1649 - RNA, 23 nt, Homo sapiens
  source 1..23: mol_type = genomic RNA
acactcaaacatggaagcactta

SEQ ID NO: 1650 - RNA, 22 nt, Homo sapiens
  source 1..22: mol_type = genomic RNA
gcaagtgcctccatgttaaagt

SEQ ID NO: 1651 - RNA, 17 nt, Homo sapiens
  source 1..17: mol_type = genomic RNA
aagcatggaagcactta

SEQ ID NO: 1652 - RNA, 17 nt, Homo sapiens
  source 1..17: mol_type = genomic RNA
aaacatggaagcaatta

SEQ ID NO: 1653 - RNA, 23 nt, Homo sapiens
  source 1..23: mol_type = genomic RNA
tgtaaggtgttgcagtgtggcaa

SEQ ID NO: 1654 - RNA, 21 nt, Homo sapiens
  source 1..21: mol_type = genomic RNA
ttgcacaccacaacagccaga

SEQ ID NO: 1655 - RNA, 23 nt, Homo sapiens
  source 1..23: mol_type = genomic RNA
ctccaacaatatcctggtgctga

SEQ ID NO: 1656 - RNA, 23 nt, Homo sapiens
  source 1..23: mol_type = genomic RNA
tccagcatcagtgattttgttga

SEQ ID NO: 1657 - RNA, 22 nt, Homo sapiens
  source 1..22: mol_type = genomic RNA
cggtgcctactgagctgatatc

SEQ ID NO: 1658 - RNA, 21 nt, Homo sapiens
  source 1..21: mol_type = genomic RNA
ctggctcagttcagcaggaac

SEQ ID NO: 1659 - RNA, 22 nt, Homo sapiens
  source 1..22: mol_type = genomic RNA
gctgcaaacatccgactgaaag

SEQ ID NO: 1660 - RNA, 22 nt, Homo sapiens
  source 1..22: mol_type = genomic RNA
cttccagtcgaggatgtttaca

SEQ ID NO: 1661 - RNA, 22 nt, Homo sapiens
  source 1..22: mol_type = genomic RNA
gaagtaaacatccacctcccag

SEQ ID NO: 1662 - RNA, 22 nt, Homo sapiens
  source 1..22: mol_type = genomic RNA
agctgagtgtaggatgtttaca

SEQ ID NO: 1663 - RNA, 22 nt, Homo sapiens
  source 1..22: mol_type = genomic RNA
ggagtaaacaaccctctcccag

SEQ ID NO: 1664 - RNA, 22 nt, Homo sapiens
  source 1..22: mol_type = genomic RNA
agagtaaacagccttctcccag

SEQ ID NO: 1665 - RNA, 23 nt, Homo sapiens
  source 1..23: mol_type = genomic RNA
gctgagagtgtaggatgtttaca

SEQ ID NO: 1666 - RNA, 22 nt, Homo sapiens
  source 1..22: mol_type = genomic RNA
gcagcaaacatctgactgaaag

SEQ ID NO: 1667 - RNA, 22 nt, Homo sapiens
  source 1..22: mol_type = genomic RNA
cttccagtcggggatgtttaca

SEQ ID NO: 1668 - RNA, 22 nt, Homo sapiens
  source 1..22: mol_type = genomic RNA
gctgtaaacatccgactgaaag

SEQ ID NO: 1669 - RNA, 22 nt, Homo sapiens
  source 1..22: mol_type = genomic RNA
cttccagtcaaggatgtttaca

SEQ ID NO: 1670 - RNA, 20 nt, Homo sapiens
  source 1..20: mol_type = genomic RNA
accaactagtaaacccatat

SEQ ID NO: 1671 - RNA, 22 nt, Homo sapiens
  source 1..22: mol_type = genomic RNA
agtccctactatgttccaggca

SEQ ID NO: 1672 - RNA, 21 nt, Homo sapiens
  source 1..21: mol_type = genomic RNA
ctggcactatatgagtcctat

SEQ ID NO: 1673 - RNA, 20 nt, Homo sapiens
  source 1..20: mol_type = genomic RNA
atatgactcgtatagtgtct

SEQ ID NO: 1674 - RNA, 23 nt, Homo sapiens
  source 1..23: mol_type = genomic RNA
agaattttcataatgcagtcaca

SEQ ID NO: 1675 - RNA, 20 nt, Homo sapiens
  source 1..20: mol_type = genomic RNA
gccatcaaagttaaaagcca

SEQ ID NO: 1676 - RNA, 21 nt, Homo sapiens
  source 1..21: mol_type = genomic RNA
tgcctgtctacacttgctgtg

SEQ ID NO: 1677 - RNA, 21 nt, Homo sapiens
  source 1..21: mol_type = genomic RNA
tgtacagcaggcacagacagg

SEQ ID NO: 1678 - RNA, 22 nt, Homo sapiens
  source 1..22: mol_type = genomic RNA
tgtcctttgcctactctattta

SEQ ID NO: 1679 - RNA, 22 nt, Homo sapiens
  source 1..22: mol_type = genomic RNA
cttaaatagaataggcaaagga

SEQ ID NO: 1680 - RNA, 22 nt, Homo sapiens
  source 1..22: mol_type = genomic RNA
aagaccgtcctcttgtcccaac

SEQ ID NO: 1681 - RNA, 17 nt, Homo sapiens
  source 1..17: mol_type = genomic RNA
gattaaacaattctctg

SEQ ID NO: 1682 - RNA, 22 nt, Homo sapiens
  source 1..22: mol_type = genomic RNA
acttcacgggagtgaggaaagt

SEQ ID NO: 1683 - RNA, 21 nt, Homo sapiens
  source 1..21: mol_type = genomic RNA
gactttgccttcgcccgcgaa

SEQ ID NO: 1684 - RNA, 20 nt, Homo sapiens
  source 1..20: mol_type = genomic RNA
tctctccacagcttcctcta

SEQ ID NO: 1685 - RNA, 22 nt, Homo sapiens
  source 1..22: mol_type = genomic RNA
tctgtgtgacggatgccagatg

SEQ ID NO: 1686 - RNA, 22 nt, Homo sapiens
  source 1..22: mol_type = genomic RNA
tgcttctggcatctgtccctca

SEQ ID NO: 1687 - RNA, 22 nt, Homo sapiens
  source 1..22: mol_type = genomic RNA
ccagcaggcctgcagaagggga

SEQ ID NO: 1688 - RNA, 23 nt, Homo sapiens
  source 1..23: mol_type = genomic RNA
cttcccattccacaagccctgat

SEQ ID NO: 1689 - RNA, 23 nt, Homo sapiens
  source 1..23: mol_type = genomic RNA
atgagagttttttacttgccaga

SEQ ID NO: 1690 - RNA, 22 nt, Homo sapiens
  source 1..22: mol_type = genomic RNA
gcagcagtgtagagattagttt

SEQ ID NO: 1691 - RNA, 22 nt, Homo sapiens
  source 1..22: mol_type = genomic RNA
aaaccaatctctacactactgc

SEQ ID NO: 1692 - RNA, 21 nt, Homo sapiens
  source 1..21: mol_type = genomic RNA
ttacccagtctccggtgcagc

SEQ ID NO: 1693 - RNA, 21 nt, Homo sapiens
  source 1..21: mol_type = genomic RNA
ggctgcaccggagactgggta

SEQ ID NO: 1694 - RNA, 23 nt, Homo sapiens
  source 1..23: mol_type = genomic RNA
aaggcccttccaccagtcctcga

SEQ ID NO: 1695 - RNA, 24 nt, Homo sapiens
  source 1..24: mol_type = genomic RNA
tcctctgagctccttctctaccca

SEQ ID NO: 1696 - RNA, 22 nt, Homo sapiens
  source 1..22: mol_type = genomic RNA
attgggttttaagagttcttta

SEQ ID NO: 1697 - RNA, 23 nt, Homo sapiens
  source 1..23: mol_type = genomic RNA
aatatgtagtcttttatccatca

SEQ ID NO: 1698 - RNA, 22 nt, Homo sapiens
  source 1..22: mol_type = genomic RNA
cactgcagtctcagcctaggca

SEQ ID NO: 1699 - RNA, 22 nt, Homo sapiens
  source 1..22: mol_type = genomic RNA
caccactgcactcgctccagcc

SEQ ID NO: 1700 - RNA, 22 nt, Homo sapiens
  source 1..22: mol_type = genomic RNA
actaactgaataggttgggcca

SEQ ID NO: 1701 - RNA, 23 nt, Homo sapiens
  source 1..23: mol_type = genomic RNA
aatgaccctacctattcagtcag

SEQ ID NO: 1702 - RNA, 24 nt, Homo sapiens
  source 1..24: mol_type = genomic RNA
accccattgctcccaggctacaga

SEQ ID NO: 1703 - RNA, 24 nt, Homo sapiens
  source 1..24: mol_type = genomic RNA
actccctctacctcactgtccaca

SEQ ID NO: 1704 - RNA, 23 nt, Homo sapiens
  source 1..23: mol_type = genomic RNA
aacaggcatctgttgagctccta

SEQ ID NO: 1705 - RNA, 22 nt, Homo sapiens
  source 1..22: mol_type = genomic RNA
atggcaatatgttggcatagca

SEQ ID NO: 1706 - RNA, 22 nt, Homo sapiens
  source 1..22: mol_type = genomic RNA
actacctgaattcccaaaagct

SEQ ID NO: 1707 - RNA, 21 nt, Homo sapiens
  source 1..21: mol_type = genomic RNA
aaagcttttggtaattcaggt

SEQ ID NO: 1708 - RNA, 19 nt, Homo sapiens
  source 1..19: mol_type = genomic RNA
tcctcctccacccgccctc

SEQ ID NO: 1709 - RNA, 22 nt, Homo sapiens
  source 1..22: mol_type = genomic RNA
tctgaaggttcagaaaggcctt

SEQ ID NO: 1710 - RNA, 25 nt, Homo sapiens
  source 1..25: mol_type = genomic RNA
cgaaagaagcgctttacaatgttat

SEQ ID NO: 1711 - RNA, 22 nt, Homo sapiens
  source 1..22: mol_type = genomic RNA
taaagagaccgaacaggtatat

SEQ ID NO: 1712 - RNA, 22 nt, Homo sapiens
  source 1..22: mol_type = genomic RNA
ctatatatctctttggtcccct

SEQ ID NO: 1713 - RNA, 24 nt, Homo sapiens
  source 1..24: mol_type = genomic RNA
caattccaaacactcaaaatatct

SEQ ID NO: 1714 - RNA, 22 nt, Homo sapiens
  source 1..22: mol_type = genomic RNA
tgagttttgagtgtttggagtt

SEQ ID NO: 1715 - RNA, 22 nt, Homo sapiens
  source 1..22: mol_type = genomic RNA
ccattctttctatcctagcatg

SEQ ID NO: 1716 - RNA, 24 nt, Homo sapiens
  source 1..24: mol_type = genomic RNA
tcacaccctcctcactgcccaacc

SEQ ID NO: 1717 - RNA, 22 nt, Homo sapiens
  source 1..22: mol_type = genomic RNA
aagcacacaccagttttttcca

SEQ ID NO: 1718 - RNA, 23 nt, Homo sapiens
  source 1..23: mol_type = genomic RNA
atacacacacatatccatacaaa

SEQ ID NO: 1719 - RNA, 22 nt, Homo sapiens
  source 1..22: mol_type = genomic RNA
ccaacctcgaggatctccccag

SEQ ID NO: 1720 - RNA, 22 nt, Homo sapiens
  source 1..22: mol_type = genomic RNA
gctgaggagatcgtcgaggttg

SEQ ID NO: 1721 - RNA, 21 nt, Homo sapiens
  source 1..21: mol_type = genomic RNA
ccaacctcgacgatctcctca

SEQ ID NO: 1722 - RNA, 22 nt, Homo sapiens
  source 1..22: mol_type = genomic RNA
gctggggagatcctcgaggttg

SEQ ID NO: 1723 - RNA, 21 nt, Homo sapiens
  source 1..21: mol_type = genomic RNA
acctgatcccattgccccacc

SEQ ID NO: 1724 - RNA, 22 nt, Homo sapiens
  source 1..22: mol_type = genomic RNA
ttattgcccctattctaacaca

SEQ ID NO: 1725 - RNA, 22 nt, Homo sapiens
  source 1..22: mol_type = genomic RNA
cttgtgttagaacagaggcaat

SEQ ID NO: 1726 - RNA, 23 nt, Homo sapiens
  source 1..23: mol_type = genomic RNA
aaatgtccctactcgctttcccc

SEQ ID NO: 1727 - RNA, 22 nt, Homo sapiens
  source 1..22: mol_type = genomic RNA
tctgctcccaactccccttctg

SEQ ID NO: 1728 - RNA, 21 nt, Homo sapiens
  source 1..21: mol_type = genomic RNA
agttcccactgcagagcctgg

SEQ ID NO: 1729 - RNA, 18 nt, Homo sapiens
  source 1..18: mol_type = genomic RNA
tcccactgcagagcctgg

SEQ ID NO: 1730 - RNA, 21 nt, Homo sapiens
  source 1..21: mol_type = genomic RNA
agaaagatctggaagtgggag

SEQ ID NO: 1731 - RNA, 22 nt, Homo sapiens
  source 1..22: mol_type = genomic RNA
tgtctcccacttccagatcttt

SEQ ID NO: 1732 - RNA, 22 nt, Homo sapiens
  source 1..22: mol_type = genomic RNA
agcttcagctagactagggcag

SEQ ID NO: 1733 - RNA, 22 nt, Homo sapiens
  source 1..22: mol_type = genomic RNA
agactgcactagcctggctgaa

SEQ ID NO: 1734 - RNA, 22 nt, Homo sapiens
  source 1..22: mol_type = genomic RNA
gtcctgcagagaggaagccctt

SEQ ID NO: 1735 - RNA, 21 nt, Homo sapiens
  source 1..21: mol_type = genomic RNA
gaagggcttcctctctgcagg

SEQ ID NO: 1736 - RNA, 22 nt, Homo sapiens
  source 1..22: mol_type = genomic RNA
gtggccgacacttgtaatccta

SEQ ID NO: 1737 - RNA, 21 nt, Homo sapiens
  source 1..21: mol_type = genomic RNA
agctatgccagcatcttgcct

SEQ ID NO: 1738 - RNA, 22 nt, Homo sapiens
  source 1..22: mol_type = genomic RNA
tgggctttctagtctcagctct

SEQ ID NO: 1739 - RNA, 22 nt, Homo sapiens
  source 1..22: mol_type = genomic RNA
ggagagctgagactagaaagcc

SEQ ID NO: 1740 - RNA, 23 nt, Homo sapiens
  source 1..23: mol_type = genomic RNA
atctgggcctctgttcttatcag

SEQ ID NO: 1741 - RNA, 21 nt, Homo sapiens
  source 1..21: mol_type = genomic RNA
tggggagtggaggggtaggga

SEQ ID NO: 1742 - RNA, 23 nt, Homo sapiens
  source 1..23: mol_type = genomic RNA
ctccccacccttctactccctaa

SEQ ID NO: 1743 - RNA, 22 nt, Homo sapiens
  source 1..22: mol_type = genomic RNA
gtcttactgccctcattttata

SEQ ID NO: 1744 - RNA, 22 nt, Homo sapiens
  source 1..22: mol_type = genomic RNA
cgccatttcccttaaagtcaca

SEQ ID NO: 1745 - RNA, 22 nt, Homo sapiens
  source 1..22: mol_type = genomic RNA
tgaggtcacattgcatccacct

SEQ ID NO: 1746 - RNA, 23 nt, Homo sapiens
  source 1..23: mol_type = genomic RNA
taggccagtaggcattgtctgcg

SEQ ID NO: 1747 - RNA, 22 nt, Homo sapiens
  source 1..22: mol_type = genomic RNA
acaccagtatttctgaaatcct

SEQ ID NO: 1748 - RNA, 17 nt, Homo sapiens
  source 1..17: mol_type = genomic RNA
gtctgactgtagaactc

SEQ ID NO: 1749 - RNA, 22 nt, Homo sapiens
  source 1..22: mol_type = genomic RNA
ctatgtgccaagcacagtccta

SEQ ID NO: 1750 - RNA, 22 nt, Homo sapiens
  source 1..22: mol_type = genomic RNA
actgtctgtctcagaaccccag

SEQ ID NO: 1751 - RNA, 24 nt, Homo sapiens
  source 1..24: mol_type = genomic RNA
gatatatacagattccatacatct

SEQ ID NO: 1752 - RNA, 22 nt, Homo sapiens
  source 1..22: mol_type = genomic RNA
tggcctgcctatttcctccttt

SEQ ID NO: 1753 - RNA, 22 nt, Homo sapiens
  source 1..22: mol_type = genomic RNA
aaaggagaaaacaggcagggca

SEQ ID NO: 1754 - RNA, 23 nt, Homo sapiens
  source 1..23: mol_type = genomic RNA
ggctctgcatctctaactcacta

SEQ ID NO: 1755 - RNA, 22 nt, Homo sapiens
  source 1..22: mol_type = genomic RNA
acgtcactgcgttctctccccg

SEQ ID NO: 1756 - RNA, 19 nt, Homo sapiens
  source 1..19: mol_type = genomic RNA
ccggtagtcccaggccagt

SEQ ID NO: 1757 - RNA, 21 nt, Homo sapiens
  source 1..21: mol_type = genomic RNA
acgtgtccccagtgccgtgca

SEQ ID NO: 1758 - RNA, 23 nt, Homo sapiens
  source 1..23: mol_type = genomic RNA
agcgcctggcacgtgtgtacaca

SEQ ID NO: 1759 - RNA, 17 nt, Homo sapiens
  source 1..17: mol_type = genomic RNA
cgatccggccgcgcccc

SEQ ID NO: 1760 - RNA, 22 nt, Homo sapiens
  source 1..22: mol_type = genomic RNA
acgtttaaatttcaccccttct

SEQ ID NO: 1761 - RNA, 19 nt, Homo sapiens
  source 1..19: mol_type = genomic RNA
ctccggaagctccgcccca

SEQ ID NO: 1762 - RNA, 22 nt, Homo sapiens
  source 1..22: mol_type = genomic RNA
ggcctccggaagctccgcccca

SEQ ID NO: 1763 - RNA, 25 nt, Homo sapiens
  source 1..25: mol_type = genomic RNA
cgacgtggggcggagcgtctggaag

SEQ ID NO: 1764 - RNA, 19 nt, Homo sapiens
  source 1..19: mol_type = genomic RNA
ccggcgccgagggcccgat

SEQ ID NO: 1765 - RNA, 17 nt, Homo sapiens
  source 1..17: mol_type = genomic RNA
gactacactacagaagc

SEQ ID NO: 1766 - RNA, 22 nt, Homo sapiens
  source 1..22: mol_type = genomic RNA
tccgagcgactccgagagaggc

SEQ ID NO: 1767 - RNA, 23 nt, Homo sapiens
  source 1..23: mol_type = genomic RNA
tgaggggcagagagcgagacttt

SEQ ID NO: 1768 - RNA, 24 nt, Homo sapiens
  source 1..24: mol_type = genomic RNA
aaaagctcggtctgaggcccctca

SEQ ID NO: 1769 - RNA, 23 nt, Homo sapiens
  source 1..23: mol_type = genomic RNA
ccgcagaccgaccgccttcttct

SEQ ID NO: 1770 - RNA, 21 nt, Homo sapiens
  source 1..21: mol_type = genomic RNA
caaagccatctctccgcgtga

SEQ ID NO: 1771 - RNA, 22 nt, Homo sapiens
  source 1..22: mol_type = genomic RNA
aagccacgtagacagacgcctg

SEQ ID NO: 1772 - RNA, 20 nt, Homo sapiens
  source 1..20: mol_type = genomic RNA
ccgcgcagccccatggccaa

SEQ ID NO: 1773 - RNA, 23 nt, Homo sapiens
  source 1..23: mol_type = genomic RNA
ccttcagccacacgctgcccagg

SEQ ID NO: 1774 - RNA, 23 nt, Homo sapiens
  source 1..23: mol_type = genomic RNA
ccccgtatccgcacaaagcctct

SEQ ID NO: 1775 - RNA, 21 nt, Homo sapiens
  source 1..21: mol_type = genomic RNA
ctaccccatcagacccaaggg

SEQ ID NO: 1776 - RNA, 25 nt, Homo sapiens
  source 1..25: mol_type = genomic RNA
tcctacccagggcacagatggggca

SEQ ID NO: 1777 - RNA, 23 nt, Homo sapiens
  source 1..23: mol_type = genomic RNA
tctctggccgtctaccttccaca

SEQ ID NO: 1778 - RNA, 20 nt, Homo sapiens
  source 1..20: mol_type = genomic RNA
tggggacgtagctggccaga

SEQ ID NO: 1779 - RNA, 23 nt, Homo sapiens
  source 1..23: mol_type = genomic RNA
ctgtctggccagctacgtcccca

SEQ ID NO: 1780 - RNA, 22 nt, Homo sapiens
  source 1..22: mol_type = genomic RNA
tggaaggtagacggccagagag

SEQ ID NO: 1781 - RNA, 23 nt, Homo sapiens
  source 1..23: mol_type = genomic RNA
ttccactgctacaacctcccaga

SEQ ID NO: 1782 - RNA, 22 nt, Homo sapiens
  source 1..22: mol_type = genomic RNA
actcctcagatcctacgcagga

SEQ ID NO: 1783 - RNA, 22 nt, Homo sapiens
  source 1..22: mol_type = genomic RNA
actgccagtgagcagcagagct

SEQ ID NO: 1784 - RNA, 21 nt, Homo sapiens
  source 1..21: mol_type = genomic RNA
cagccctcctggtggctggcc

SEQ ID NO: 1785 - RNA, 17 nt, Homo sapiens
  source 1..17: mol_type = genomic RNA
aacccgggcccggcgcg

SEQ ID NO: 1786 - RNA, 18 nt, Homo sapiens
  source 1..18: mol_type = genomic RNA
gaggcccctgccgccccg

SEQ ID NO: 1787 - RNA, 23 nt, Homo sapiens
  source 1..23: mol_type = genomic RNA
cgcctttccgagcctgcgcctcc

SEQ ID NO: 1788 - RNA, 22 nt, Homo sapiens
  source 1..22: mol_type = genomic RNA
tctccattccccaggactccac

SEQ ID NO: 1789 - RNA, 23 nt, Homo sapiens
  source 1..23: mol_type = genomic RNA
aactttctcctaaggcagtccct

SEQ ID NO: 1790 - RNA, 22 nt, Homo sapiens
  source 1..22: mol_type = genomic RNA
cagacctgagtagcgcaaggtg

SEQ ID NO: 1791 - RNA, 22 nt, Homo sapiens
  source 1..22: mol_type = genomic RNA
accttgtgcgccttctcagatt

SEQ ID NO: 1792 - RNA, 17 nt, Homo sapiens
  source 1..17: mol_type = genomic RNA
atttttcttcatatccc

SEQ ID NO: 1793 - RNA, 22 nt, Homo sapiens
  source 1..22: mol_type = genomic RNA
attaaagctcttctcccttcca

SEQ ID NO: 1794 - RNA, 22 nt, Homo sapiens
  source 1..22: mol_type = genomic RNA
tcgccctctcaacccagctttt

SEQ ID NO: 1795 - RNA, 22 nt, Homo sapiens
  source 1..22: mol_type = genomic RNA
ttgccctctcaacccagctttt

SEQ ID NO: 1796 - RNA, 20 nt, Homo sapiens
  source 1..20: mol_type = genomic RNA
accctctcaacccagctttt

SEQ ID NO: 1797 - RNA, 19 nt, Homo sapiens
  source 1..19: mol_type = genomic RNA
tcctctcaacccagctttt

SEQ ID NO: 1798 - RNA, 18 nt, Homo sapiens
  source 1..18: mol_type = genomic RNA
ccttctcaacccagcttt

SEQ ID NO: 1799 - RNA, 21 nt, Homo sapiens
  source 1..21: mol_type = genomic RNA
agaggtcgaccgtgtaatgtg

SEQ ID NO: 1800 - RNA, 22 nt, Homo sapiens
  source 1..22: mol_type = genomic RNA
gcgaacgcgccacggaccacct

SEQ ID NO: 1801 - RNA, 22 nt, Homo sapiens
  source 1..22: mol_type = genomic RNA
aagaggtcgaccgtgtattggg

SEQ ID NO: 1802 - RNA, 23 nt, Homo sapiens
  source 1..23: mol_type = genomic RNA
tgcgaactcaccacggacaacct

SEQ ID NO: 1803 - RNA, 22 nt, Homo sapiens
  source 1..22: mol_type = genomic RNA
aaatatcacacacactaaattg

SEQ ID NO: 1804 - RNA, 20 nt, Homo sapiens
  source 1..20: mol_type = genomic RNA
ccagcagcacctggggcagt

SEQ ID NO: 1805 - RNA, 23 nt, Homo sapiens
  source 1..23: mol_type = genomic RNA
acaccaatgccctaggggatgcg

SEQ ID NO: 1806 - RNA, 23 nt, Homo sapiens
  source 1..23: mol_type = genomic RNA
acacttactggacacctactagg

SEQ ID NO: 1807 - RNA, 22 nt, Homo sapiens
  source 1..22: mol_type = genomic RNA
tgcaacttagtaatgtgcaata

SEQ ID NO: 1808 - RNA, 20 nt, Homo sapiens
  source 1..20: mol_type = genomic RNA
ctggaggaagggcccagagg

SEQ ID NO: 1809 - RNA, 22 nt, Homo sapiens
  source 1..22: mol_type = genomic RNA
acggaagggcagagagggccag

SEQ ID NO: 1810 - RNA, 22 nt, Homo sapiens
  source 1..22: mol_type = genomic RNA
aaagaggttaaccaggtgtgtt

SEQ ID NO: 1811 - RNA, 23 nt, Homo sapiens
  source 1..23: mol_type = genomic RNA
tctctgcaggccgtgtgctttgc

SEQ ID NO: 1812 - RNA, 22 nt, Homo sapiens
  source 1..22: mol_type = genomic RNA
gcctaagacacaggcccagaga

SEQ ID NO: 1813 - RNA, 21 nt, Homo sapiens
  source 1..21: mol_type = genomic RNA
ttctaggataggcccaggggc

SEQ ID NO: 1814 - RNA, 22 nt, Homo sapiens
  source 1..22: mol_type = genomic RNA
ggatccctgggaccatacctag

SEQ ID NO: 1815 - RNA, 22 nt, Homo sapiens
  source 1..22: mol_type = genomic RNA
ggtcaggagcaataatgaaaaa

SEQ ID NO: 1816 - RNA, 23 nt, Homo sapiens
  source 1..23: mol_type = genomic RNA
acatttttcgttattgctcttga

SEQ ID NO: 1817 - RNA, 22 nt, Homo sapiens
  source 1..22: mol_type = genomic RNA
gaagaaaggcatcatataggag

SEQ ID NO: 1818 - RNA, 21 nt, Homo sapiens
  source 1..21: mol_type = genomic RNA
aactcctgtatgaagccgttc

SEQ ID NO: 1819 - RNA, 22 nt, Homo sapiens
  source 1..22: mol_type = genomic RNA
caacaaaatcactgatgctgga

SEQ ID NO: 1820 - RNA, 22 nt, Homo sapiens
  source 1..22: mol_type = genomic RNA
cactcagcaccaggatattgtt

SEQ ID NO: 1821 - RNA, 23 nt, Homo sapiens
  source 1..23: mol_type = genomic RNA
cggctctgtcgtcgaggcgctca

SEQ ID NO: 1822 - RNA, 23 nt, Homo sapiens
  source 1..23: mol_type = genomic RNA
cgtgagctcctggaggacaggga

SEQ ID NO: 1823 - RNA, 22 nt, Homo sapiens
  source 1..22: mol_type = genomic RNA
gtgatgcactgtggaaacattg

SEQ ID NO: 1824 - RNA, 21 nt, Homo sapiens
  source 1..21: mol_type = genomic RNA
tgcaatgcaactacaatgcac

SEQ ID NO: 1825 - RNA, 22 nt, Homo sapiens
  source 1..22: mol_type = genomic RNA
gggctgcactgccgaggcactg

SEQ ID NO: 1826 - RNA, 20 nt, Homo sapiens
  source 1..20: mol_type = genomic RNA
gcaatgcaacagcaatgcac

SEQ ID NO: 1827 - RNA, 22 nt, Homo sapiens
  source 1..22: mol_type = genomic RNA
gctataaagtaactgagacgga

SEQ ID NO: 1828 - RNA, 22 nt, Homo sapiens
  source 1..22: mol_type = genomic RNA
aatcagtctcattgctttataa

SEQ ID NO: 1829 - RNA, 23 nt, Homo sapiens
  source 1..23: mol_type = genomic RNA
acgggtgcgatttctgtgtgaga

SEQ ID NO: 1830 - RNA, 21 nt, Homo sapiens
  source 1..21: mol_type = genomic RNA
tcaatcacagatagcacccct

SEQ ID NO: 1831 - RNA, 22 nt, Homo sapiens
  source 1..22: mol_type = genomic RNA
ctccagacccctcgttcagggc

SEQ ID NO: 1832 - RNA, 22 nt, Homo sapiens
  source 1..22: mol_type = genomic RNA
gagccctggactaggagtcagc

SEQ ID NO: 1833 - RNA, 23 nt, Homo sapiens
  source 1..23: mol_type = genomic RNA
agaggcaggcatgcgggcagaca

SEQ ID NO: 1834 - RNA, 22 nt, Homo sapiens
  source 1..22: mol_type = genomic RNA
agggcagtatacttgctgattg

SEQ ID NO: 1835 - RNA, 22 nt, Homo sapiens
  source 1..22: mol_type = genomic RNA
acaaccagctaagacactgcca

SEQ ID NO: 1836 - RNA, 22 nt, Homo sapiens
  source 1..22: mol_type = genomic RNA
atggcagtggagttagtgattg

SEQ ID NO: 1837 - RNA, 23 nt, Homo sapiens
  source 1..23: mol_type = genomic RNA
caatcagctaatgacactgccta

SEQ ID NO: 1838 - RNA, 22 nt, Homo sapiens
  source 1..22: mol_type = genomic RNA
cctggccgtgtggttagtgatt

SEQ ID NO: 1839 - RNA, 23 nt, Homo sapiens
  source 1..23: mol_type = genomic RNA
gcaatcagctaactacactgcct

SEQ ID NO: 1840 - RNA, 24 nt, Homo sapiens
  source 1..24: mol_type = genomic RNA
tggaagactagtgattttgttgtt

SEQ ID NO: 1841 - RNA, 22 nt, Homo sapiens
  source 1..22: mol_type = genomic RNA
aacaacaaatcccagtctacct

SEQ ID NO: 1842 - RNA, 22 nt, Homo sapiens
  source 1..22: mol_type = genomic RNA
gtggagtgtgacaatggtgttt

SEQ ID NO: 1843 - RNA, 23 nt, Homo sapiens
  source 1..23: mol_type = genomic RNA
tcaaacgccattatcacactaaa

SEQ ID NO: 1844 - RNA, 23 nt, Homo sapiens
  source 1..23: mol_type = genomic RNA
ctagaggacaggtaacacggagg

SEQ ID NO: 1845 - RNA, 23 nt, Homo sapiens
  source 1..23: mol_type = genomic RNA
ggcttccttgctatccatcctca

SEQ ID NO: 1846 - RNA, 21 nt, Homo sapiens
  source 1..21: mol_type = genomic RNA
ctaagtagtgaaagaaatttt

SEQ ID NO: 1847 - RNA, 21 nt, Homo sapiens
  source 1..21: mol_type = genomic RNA
aattaaaatagccttcactaa

SEQ ID NO: 1848 - RNA, 20 nt, Homo sapiens
  source 1..20: mol_type = genomic RNA
catcagaaagcgtttacagt

SEQ ID NO: 1849 - RNA, 22 nt, Homo sapiens
  source 1..22: mol_type = genomic RNA
actgatttgcttcatcacatgc

SEQ ID NO: 1850 - RNA, 24 nt, Homo sapiens
  source 1..24: mol_type = genomic RNA
cagccagtattactcatcactttg

SEQ ID NO: 1851 - RNA, 20 nt, Homo sapiens
  source 1..20: mol_type = genomic RNA
cggcgcctcctttccgattc

SEQ ID NO: 1852 - RNA, 21 nt, Homo sapiens
  source 1..21: mol_type = genomic RNA
taagaatttctttcttcacaa

SEQ ID NO: 1853 - RNA, 22 nt, Homo sapiens
  source 1..22: mol_type = genomic RNA
tccatttctcaagatgcctcct

SEQ ID NO: 1854 - RNA, 24 nt, Homo sapiens
  source 1..24: mol_type = genomic RNA
gaagggttgggcttttttttttgt

SEQ ID NO: 1855 - RNA, 22 nt, Homo sapiens
  source 1..22: mol_type = genomic RNA
gaacaaaaaaaaaagtacaaca

SEQ ID NO: 1856 - RNA, 23 nt, Homo sapiens
  source 1..23: mol_type = genomic RNA
aaatcagaatcacacctggggga

SEQ ID NO: 1857 - RNA, 23 nt, Homo sapiens
  source 1..23: mol_type = genomic RNA
aaaacaccaagatctgaaggcta

SEQ ID NO: 1858 - RNA, 23 nt, Homo sapiens
  source 1..23: mol_type = genomic RNA
gggcagccttcagatccaagtgg

SEQ ID NO: 1859 - RNA, 21 nt, Homo sapiens
  source 1..21: mol_type = genomic RNA
gagccgcgaggagccgagaga

SEQ ID NO: 1860 - RNA, 22 nt, Homo sapiens
  source 1..22: mol_type = genomic RNA
gtacccctggagattctgataa

SEQ ID NO: 1861 - RNA, 23 nt, Homo sapiens
  source 1..23: mol_type = genomic RNA
gcctgcatcatgaaatgccctcg

SEQ ID NO: 1862 - RNA, 22 nt, Homo sapiens
  source 1..22: mol_type = genomic RNA
acatatcatgagtgcacttcat

SEQ ID NO: 1863 - RNA, 23 nt, Homo sapiens
  source 1..23: mol_type = genomic RNA
agaaaggacatagggtgctgatg

SEQ ID NO: 1864 - RNA, 22 nt, Homo sapiens
  source 1..22: mol_type = genomic RNA
cccatcttgcaactatgtcttt

SEQ ID NO: 1865 - RNA, 22 nt, Homo sapiens
  source 1..22: mol_type = genomic RNA
gctcttttcattaatgtagaca

SEQ ID NO: 1866 - RNA, 22 nt, Homo sapiens
  source 1..22: mol_type = genomic RNA
ccacagcaggcaggatggtccc

SEQ ID NO: 1867 - RNA, 22 nt, Homo sapiens
  source 1..22: mol_type = genomic RNA
gctgcaccagcctgcctgctga

SEQ ID NO: 1868 - RNA, 22 nt, Homo sapiens
  source 1..22: mol_type = genomic RNA
ctgggtgcgggatgcagggtga

SEQ ID NO: 1869 - RNA, 22 nt, Homo sapiens
  source 1..22: mol_type = genomic RNA
ggcccagcccagcccagcccac

SEQ ID NO: 1870 - RNA, 20 nt, Homo sapiens
  source 1..20: mol_type = genomic RNA
cctgcagaccccgacccgcg

SEQ ID NO: 1871 - RNA, 22 nt, Homo sapiens
  source 1..22: mol_type = genomic RNA
acaggcatgggaggtcaggtga

SEQ ID NO: 1872 - RNA, 22 nt, Homo sapiens
  source 1..22: mol_type = genomic RNA
ctcacctgagctcccgtgcctg

SEQ ID NO: 1873 - RNA, 21 nt, Homo sapiens
  source 1..21: mol_type = genomic RNA
caggcacgggagctcaggtga

SEQ ID NO: 1874 - RNA, 20 nt, Homo sapiens
  source 1..20: mol_type = genomic RNA
tcacctgacctcccatgcct

SEQ ID NO: 1875 - RNA, 22 nt, Homo sapiens
  source 1..22: mol_type = genomic RNA
tgaatccttgaataggtgtgtt

SEQ ID NO: 1876 - RNA, 24 nt, Homo sapiens
  source 1..24: mol_type = genomic RNA
actcacacctaggttccaaggatt

SEQ ID NO: 1877 - RNA, 22 nt, Homo sapiens
  source 1..22: mol_type = genomic RNA
tacagatggataccgtgcaatt

SEQ ID NO: 1878 - RNA, 22 nt, Homo sapiens
  source 1..22: mol_type = genomic RNA
aaattgcatcgtgatccacccg

SEQ ID NO: 1879 - RNA, 22 nt, Homo sapiens
  source 1..22: mol_type = genomic RNA
tgggctgggctcatttcatttt

SEQ ID NO: 1880 - RNA, 21 nt, Homo sapiens
  source 1..21: mol_type = genomic RNA
ccctcggcgatccccgcggct

SEQ ID NO: 1881 - RNA, 19 nt, Homo sapiens
  source 1..19: mol_type = genomic RNA
cttagacactcaggtccct

SEQ ID NO: 1882 - RNA, 19 nt, Homo sapiens
  source 1..19: mol_type = genomic RNA
ggactctacagacacacct

SEQ ID NO: 1883 - RNA, 24 nt, Homo sapiens
  source 1..24: mol_type = genomic RNA
tcatgtaccagcgaccgggctatg

SEQ ID NO: 1884 - RNA, 18 nt, Homo sapiens
  source 1..18: mol_type = genomic RNA
tcctcacacctccagccg

SEQ ID NO: 1885 - RNA, 18 nt, Homo sapiens
  source 1..18: mol_type = genomic RNA
cttcagtcaacttcttag

SEQ ID NO: 1886 - RNA, 19 nt, Homo sapiens
  source 1..19: mol_type = genomic RNA
ttcctcagcttgtccagtc

SEQ ID NO: 1887 - RNA, 21 nt, Homo sapiens
  source 1..21: mol_type = genomic RNA
agcaacaccgcagcgacaagc

SEQ ID NO: 1888 - RNA, 17 nt, Homo sapiens
  source 1..17: mol_type = genomic RNA
ccacccccgcacccgcc

SEQ ID NO: 1889 - RNA, 21 nt, Homo sapiens
  source 1..21: mol_type = genomic RNA
aatcaccaataatgggacaca

SEQ ID NO: 1890 - RNA, 22 nt, Homo sapiens
  source 1..22: mol_type = genomic RNA
atctccatggtgttttcttaaa

SEQ ID NO: 1891 - RNA, 21 nt, Homo sapiens
  source 1..21: mol_type = genomic RNA
tgccctcgtagacaacactca

SEQ ID NO: 1892 - RNA, 22 nt, Homo sapiens
  source 1..22: mol_type = genomic RNA
ataaggatttttaggggcatta

SEQ ID NO: 1893 - RNA, 23 nt, Homo sapiens
  source 1..23: mol_type = genomic RNA
cacatctgcccccaaaagtccct

SEQ ID NO: 1894 - RNA, 22 nt, Homo sapiens
  source 1..22: mol_type = genomic RNA
ataaggatttttaggggcatta

SEQ ID NO: 1895 - RNA, 22 nt, Homo sapiens
  source 1..22: mol_type = genomic RNA
acagctgcccctgaaagtccct

SEQ ID NO: 1896 - RNA, 21 nt, Homo sapiens
  source 1..21: mol_type = genomic RNA
tcaaaatgctctcctgtcagt

SEQ ID NO: 1897 - RNA, 22 nt, Homo sapiens
  source 1..22: mol_type = genomic RNA
cagctgtccgagtcccaggtca

SEQ ID NO: 1898 - RNA, 24 nt, Homo sapiens
  source 1..24: mol_type = genomic RNA
catcagtcactactcatcattttc

SEQ ID NO: 1899 - RNA, 23 nt, Homo sapiens
  source 1..23: mol_type = genomic RNA
gcgcccggcctgtgtggtgctca

SEQ ID NO: 1900 - RNA, 21 nt, Homo sapiens
  source 1..21: mol_type = genomic RNA
ccgagcaccacgcagaccagc

SEQ ID NO: 1901 - RNA, 22 nt, Homo sapiens
  source 1..22: mol_type = genomic RNA
aactctgtctttactcctgaga

SEQ ID NO: 1902 - RNA, 22 nt, Homo sapiens
  source 1..22: mol_type = genomic RNA
actcatgagtgaagacagagtt

SEQ ID NO: 1903 - RNA, 18 nt, Homo sapiens
  source 1..18: mol_type = genomic RNA
cgccgccccgcacctgct

SEQ ID NO: 1904 - RNA, 21 nt, Homo sapiens
  source 1..21: mol_type = genomic RNA
tcggcatctacacttgcactg

SEQ ID NO: 1905 - RNA, 22 nt, Homo sapiens
  source 1..22: mol_type = genomic RNA
aaagacccatggagaggaaggt

SEQ ID NO: 1906 - RNA, 22 nt, Homo sapiens
  source 1..22: mol_type = genomic RNA
accttctcctcaatgggtcttt

SEQ ID NO: 1907 - RNA, 21 nt, Homo sapiens
  source 1..21: mol_type = genomic RNA
attttgatcaatctctacatt

SEQ ID NO: 1908 - RNA, 23 nt, Homo sapiens
  source 1..23: mol_type = genomic RNA
tatattccgtatacatattccgt

SEQ ID NO: 1909 - RNA, 24 nt, Homo sapiens
  source 1..24: mol_type = genomic RNA
tagagaaggacagctgtgagctct

SEQ ID NO: 1910 - RNA, 22 nt, Homo sapiens
  source 1..22: mol_type = genomic RNA
tgcagactagtccttatttgat

SEQ ID NO: 1911 - RNA, 23 nt, Homo sapiens
  source 1..23: mol_type = genomic RNA
aagatgttttacatgagtctcat

SEQ ID NO: 1912 - RNA, 21 nt, Homo sapiens
  source 1..21: mol_type = genomic RNA
tattccgtatatacattccat

SEQ ID NO: 1913 - RNA, 22 nt, Homo sapiens
  source 1..22: mol_type = genomic RNA
tcaccattgctaaagtgcaatt

SEQ ID NO: 1914 - RNA, 22 nt, Homo sapiens
  source 1..22: mol_type = genomic RNA
ggccaatcttaggttctacaat

SEQ ID NO: 1915 - RNA, 22 nt, Homo sapiens
  source 1..22: mol_type = genomic RNA
ttgggggagttccttagagatg

SEQ ID NO: 1916 - RNA, 23 nt, Homo sapiens
  source 1..23: mol_type = genomic RNA
gaaatctctacagaagccccata

SEQ ID NO: 1917 - RNA, 22 nt, Homo sapiens
  source 1..22: mol_type = genomic RNA
agagttgcatattagcaacagt

SEQ ID NO: 1918 - RNA, 20 nt, Homo sapiens
  source 1..20: mol_type = genomic RNA
aaagcgtgggggaaacacgg

SEQ ID NO: 1919 - RNA, 15 nt, Homo sapiens
  source 1..15: mol_type = genomic RNA
aacccaggatctcct

SEQ ID NO: 1920 - RNA, 22 nt, Homo sapiens
  source 1..22: mol_type = genomic RNA
ggccgtggccagagcccacgag

SEQ ID NO: 1921 - RNA, 22 nt, Homo sapiens
  source 1..22: mol_type = genomic RNA
cactgcagggctctggccactg

SEQ ID NO: 1922 - RNA, 22 nt, Homo sapiens
  source 1..22: mol_type = genomic RNA
ccggtccgtacaaactctgcag

SEQ ID NO: 1923 - RNA, 20 nt, Homo sapiens
  source 1..20: mol_type = genomic RNA
cacagcagagtttgtacgga

SEQ ID NO: 1924 - RNA, 22 nt, Homo sapiens
  source 1..22: mol_type = genomic RNA
gatgaagattactggggggaag

SEQ ID NO: 1925 - RNA, 23 nt, Homo sapiens
  source 1..23: mol_type = genomic RNA
tccccttccctgccatatcctca

SEQ ID NO: 1926 - RNA, 23 nt, Homo sapiens
  source 1..23: mol_type = genomic RNA
cctactcccagggtcatgcaaaa

SEQ ID NO: 1927 - RNA, 22 nt, Homo sapiens
  source 1..22: mol_type = genomic RNA
tgcacaatcctgtgagtgagtc

SEQ ID NO: 1928 - RNA, 22 nt, Homo sapiens
  source 1..22: mol_type = genomic RNA
agtagtggatgaagcactgtgt

SEQ ID NO: 1929 - RNA, 22 nt, Homo sapiens
  source 1..22: mol_type = genomic RNA
gcacagagtgcatcatccacta

SEQ ID NO: 1930 - RNA, 21 nt, Homo sapiens
  source 1..21: mol_type = genomic RNA
ctacctccacctgtatcatca

SEQ ID NO: 1931 - RNA, 22 nt, Homo sapiens
  source 1..22: mol_type = genomic RNA
atgataacacaggtagaagtag

SEQ ID NO: 1932 - RNA, 22 nt, Homo sapiens
  source 1..22: mol_type = genomic RNA
tgatactacttccaatgtcgca

SEQ ID NO: 1933 - RNA, 21 nt, Homo sapiens
  source 1..21: mol_type = genomic RNA
aaggacgtgtactaggtctaa

SEQ ID NO: 1934 - RNA, 22 nt, Homo sapiens
  source 1..22: mol_type = genomic RNA
agtcttcaggtagggtaggaaa

SEQ ID NO: 1935 - RNA, 22 nt, Homo sapiens
  source 1..22: mol_type = genomic RNA
tcatttactttctcttacagat

SEQ ID NO: 1936 - RNA, 24 nt, Homo sapiens
  source 1..24: mol_type = genomic RNA
acgtcgcacgaacgcctgtccggg

SEQ ID NO: 1937 - RNA, 22 nt, Homo sapiens
  source 1..22: mol_type = genomic RNA
agagtggcaaagtctttccata

SEQ ID NO: 1938 - RNA, 21 nt, Homo sapiens
  source 1..21: mol_type = genomic RNA
atatggaaagactttgccact

SEQ ID NO: 1939 - RNA, 22 nt, Homo sapiens
  source 1..22: mol_type = genomic RNA
accacgatatcacacctcccag

SEQ ID NO: 1940 - RNA, 22 nt, Homo sapiens
  source 1..22: mol_type = genomic RNA
tcccaggaaccatgatatcaca

SEQ ID NO: 1941 - RNA, 22 nt, Homo sapiens
  source 1..22: mol_type = genomic RNA
accacaatatcacacctcccag

SEQ ID NO: 1942 - RNA, 22 nt, Homo sapiens
  source 1..22: mol_type = genomic RNA
tcccaggaaccatgatatcaca

SEQ ID NO: 1943 - RNA, 22 nt, Homo sapiens
  source 1..22: mol_type = genomic RNA
accacaatatcacacctcccag

SEQ ID NO: 1944 - RNA, 22 nt, Homo sapiens
  source 1..22: mol_type = genomic RNA
cgagtgtgagatcacacctccc

SEQ ID NO: 1945 - RNA, 22 nt, Homo sapiens
  source 1..22: mol_type = genomic RNA
tcccaggaaccatgatatcaca

SEQ ID NO: 1946 - RNA, 22 nt, Homo sapiens
  source 1..22: mol_type = genomic RNA
tcccaggaagcacgatatcaca

SEQ ID NO: 1947 - RNA, 23 nt, Homo sapiens
  source 1..23: mol_type = genomic RNA
ctttgtctacgctgggtccaggt

SEQ ID NO: 1948 - RNA, 22 nt, Homo sapiens
  source 1..22: mol_type = genomic RNA
gagaggatgacgcagacttggt

SEQ ID NO: 1949 - RNA, 23 nt, Homo sapiens
  source 1..23: mol_type = genomic RNA
gtaccgagtctccatcatccact

SEQ ID NO: 1950 - RNA, 24 nt, Homo sapiens
  source 1..24: mol_type = genomic RNA
acttctgcagtgtcagtgtggaac

SEQ ID NO: 1951 - RNA, 24 nt, Homo sapiens
  source 1..24: mol_type = genomic RNA
cagtatccactcctgaccagcagg

SEQ ID NO: 1952 - RNA, 21 nt, Homo sapiens
  source 1..21: mol_type = genomic RNA
aaagatcaaccatgtattatt

SEQ ID NO: 1953 - RNA, 22 nt, Homo sapiens
  source 1..22: mol_type = genomic RNA
gcgaatataacacggtcgatct

SEQ ID NO: 1954 - RNA, 22 nt, Homo sapiens
  source 1..22: mol_type = genomic RNA
accaggttccaccccagcaggc

SEQ ID NO: 1955 - RNA, 20 nt, Homo sapiens
  source 1..20: mol_type = genomic RNA
accatccccaaacggatacc

SEQ ID NO: 1956 - RNA, 22 nt, Homo sapiens
  source 1..22: mol_type = genomic RNA
acaggggagcactgctgccttc

SEQ ID NO: 1957 - RNA, 23 nt, Homo sapiens
  source 1..23: mol_type = genomic RNA
acactcaaaagatggcggcactt

SEQ ID NO: 1958 - RNA, 20 nt, Homo sapiens
  source 1..20: mol_type = genomic RNA
agtgcccccacagtttgagt

SEQ ID NO: 1959 - RNA, 23 nt, Homo sapiens
  source 1..23: mol_type = genomic RNA
gcactcaaactgtgggggcactt

SEQ ID NO: 1960 - RNA, 22 nt, Homo sapiens
  source 1..22: mol_type = genomic RNA
aaagtgccgccatcttttgagt

SEQ ID NO: 1961 - RNA, 23 nt, Homo sapiens
  source 1..23: mol_type = genomic RNA
acgctcaaatgtcgcagcacttt

SEQ ID NO: 1962 - RNA, 23 nt, Homo sapiens
  source 1..23: mol_type = genomic RNA
acaccccaaaatcgaagcacttc

SEQ ID NO: 1963 - RNA, 22 nt, Homo sapiens
  source 1..22: mol_type = genomic RNA
ggaaagcgcccccattttgagt

SEQ ID NO: 1964 - RNA, 22 nt, Homo sapiens
  source 1..22: mol_type = genomic RNA
aattacaatacaatctgataag

SEQ ID NO: 1965 - RNA, 22 nt, Homo sapiens
  source 1..22: mol_type = genomic RNA
cacttatcaggttgtattataa

SEQ ID NO: 1966 - RNA, 22 nt, Homo sapiens
  source 1..22: mol_type = genomic RNA
aatgataatacaacctgctaag

SEQ ID NO: 1967 - RNA, 22 nt, Homo sapiens
  source 1..22: mol_type = genomic RNA
cacttagcaggttgtattatat

SEQ ID NO: 1968 - RNA, 22 nt, Homo sapiens
  source 1..22: mol_type = genomic RNA
atataatacaacctgctaagtg

SEQ ID NO: 1969 - RNA, 22 nt, Homo sapiens
  source 1..22: mol_type = genomic RNA
agcacttagcaggttgtattat

SEQ ID NO: 1970 - RNA, 22 nt, Homo sapiens
  source 1..22: mol_type = genomic RNA
tcacgcgagccgaacgaacaaa

SEQ ID NO: 1971 - RNA, 21 nt, Homo sapiens
  source 1..21: mol_type = genomic RNA
accatagaaggaaaatctacc

SEQ ID NO: 1972 - RNA, 21 nt, Homo sapiens
  source 1..21: mol_type = genomic RNA
acgtggattttcctctatgat

SEQ ID NO: 1973 - RNA, 22 nt, Homo sapiens
  source 1..22: mol_type = genomic RNA
tactcatagaaggagaatctac

SEQ ID NO: 1974 - RNA, 22 nt, Homo sapiens
  source 1..22: mol_type = genomic RNA
aacatggattttcctctatgat

SEQ ID NO: 1975 - RNA, 22 nt, Homo sapiens
  source 1..22: mol_type = genomic RNA
aaacatagaaggaatatccacg

SEQ ID NO: 1976 - RNA, 21 nt, Homo sapiens
  source 1..21: mol_type = genomic RNA
acgtggaatttcctctatgtt

SEQ ID NO: 1977 - RNA, 21 nt, Homo sapiens
  source 1..21: mol_type = genomic RNA
aacatagaaggaatatccacc

SEQ ID NO: 1978 - RNA, 22 nt, Homo sapiens
  source 1..22: mol_type = genomic RNA
acaaaagttgcctttgtgtgat

SEQ ID NO: 1979 - RNA, 22 nt, Homo sapiens
  source 1..22: mol_type = genomic RNA
gaattcaccaagggcaacctct

SEQ ID NO: 1980 - RNA, 21 nt, Homo sapiens
  source 1..21: mol_type = genomic RNA
ccttctgactccaagtccagt

SEQ ID NO: 1981 - RNA, 22 nt, Homo sapiens
  source 1..22: mol_type = genomic RNA
acacaggacctggagtcaggag

SEQ ID NO: 1982 - RNA, 19 nt, Homo sapiens
  source 1..19: mol_type = genomic RNA
ttctgcctccaagtccagt

SEQ ID NO: 1983 - RNA, 25 nt, Homo sapiens
  source 1..25: mol_type = genomic RNA
ccactcttctgactccaagtccagt

SEQ ID NO: 1984 - RNA, 20 nt, Homo sapiens
  source 1..20: mol_type = genomic RNA
tttctgactccaagtccagt

SEQ ID NO: 1985 - RNA, 19 nt, Homo sapiens
  source 1..19: mol_type = genomic RNA
tcctgactccaagtccagt

SEQ ID NO: 1986 - RNA, 20 nt, Homo sapiens
  source 1..20: mol_type = genomic RNA
cttctggctccaagtccagt

SEQ ID NO: 1987 - RNA, 20 nt, Homo sapiens
  source 1..20: mol_type = genomic RNA
cttctgactccaagcccagt

SEQ ID NO: 1988 - RNA, 21 nt, Homo sapiens
  source 1..21: mol_type = genomic RNA
ccatctgacaccaagtccagt

SEQ ID NO: 1989 - RNA, 21 nt, Homo sapiens
  source 1..21: mol_type = genomic RNA
ccttctgactcctagtccagt

SEQ ID NO: 1990 - RNA, 19 nt, Homo sapiens
  source 1..19: mol_type = genomic RNA
ttctggctccaaatccagt

SEQ ID NO: 1991 - RNA, 22 nt, Homo sapiens
  source 1..22: mol_type = genomic RNA
agttagtggaccatgttacata

SEQ ID NO: 1992 - RNA, 21 nt, Homo sapiens
  source 1..21: mol_type = genomic RNA
cctacgttccatagtctacca

SEQ ID NO: 1993 - RNA, 22 nt, Homo sapiens
  source 1..22: mol_type = genomic RNA
aagatgtggaccatattacata

SEQ ID NO: 1994 - RNA, 22 nt, Homo sapiens
  source 1..22: mol_type = genomic RNA
gcgcatgttctatggtcaacca

SEQ ID NO: 1995 - RNA, 22 nt, Homo sapiens
  source 1..22: mol_type = genomic RNA
acagagagcttgcccttgtata

SEQ ID NO: 1996 - RNA, 22 nt, Homo sapiens
  source 1..22: mol_type = genomic RNA
atatacaaagggcaacctcgct

SEQ ID NO: 1997 - RNA, 21 nt, Homo sapiens
  source 1..21: mol_type = genomic RNA
aagtgttgtccgtgaatgatt

SEQ ID NO: 1998 - RNA, 22 nt, Homo sapiens
  source 1..22: mol_type = genomic RNA
cgaatccaccacgaacaacttc

SEQ ID NO: 1999 - RNA, 22 nt, Homo sapiens
  source 1..22: mol_type = genomic RNA
agccacaatcaccttctgatct

SEQ ID NO: 2000 - RNA, 20 nt, Homo sapiens
  source 1..20: mol_type = genomic RNA
tatgaacaatttctaggaat

SEQ ID NO: 2001 - RNA, 22 nt, Homo sapiens
  source 1..22: mol_type = genomic RNA
tgtgagccagcctggagcacct

SEQ ID NO: 2002 - RNA, 22 nt, Homo sapiens
  source 1..22: mol_type = genomic RNA
aaacagtctacctacattgctc

SEQ ID NO: 2003 - RNA, 22 nt, Homo sapiens
  source 1..22: mol_type = genomic RNA
agactgcaggccctagaggaca

SEQ ID NO: 2004 - RNA, 20 nt, Homo sapiens
  source 1..20: mol_type = genomic RNA
tgtcttggttttatgccttt

SEQ ID NO: 2005 - RNA, 22 nt, Homo sapiens
  source 1..22: mol_type = genomic RNA
tgcctcctccaggatccacaca

SEQ ID NO: 2006 - RNA, 21 nt, Homo sapiens
  source 1..21: mol_type = genomic RNA
acatgtccatattatgcgtta

SEQ ID NO: 2007 - RNA, 22 nt, Homo sapiens
  source 1..22: mol_type = genomic RNA
tttgggactgatcttgatgtct

SEQ ID NO: 2008 - RNA, 22 nt, Homo sapiens
  source 1..22: mol_type = genomic RNA
agacatcaagatcagtcccaaa

SEQ ID NO: 2009 - RNA, 22 nt, Homo sapiens
  source 1..22: mol_type = genomic RNA
acttctcattttctggttcctt

SEQ ID NO: 2010 - RNA, 22 nt, Homo sapiens
  source 1..22: mol_type = genomic RNA
aataagaccatcttttcctcaa

SEQ ID NO: 2011 - RNA, 26 nt, Homo sapiens
  source 1..26: mol_type = genomic RNA
ctgagaaccagccatttcttcctctt

SEQ ID NO: 2012 - RNA, 20 nt, Homo sapiens
  source 1..20: mol_type = genomic RNA
cccacctgctcagtccgagc

SEQ ID NO: 2013 - RNA, 21 nt, Homo sapiens
  source 1..21: mol_type = genomic RNA
agtctccatctgcggccctgt

SEQ ID NO: 2014 - RNA, 21 nt, Homo sapiens
  source 1..21: mol_type = genomic RNA
actgagtcctttgttctctgc

SEQ ID NO: 2015 - RNA, 22 nt, Homo sapiens
  source 1..22: mol_type = genomic RNA
tcagagagttaagataatcagt

SEQ ID NO: 2016 - RNA, 23 nt, Homo sapiens
  source 1..23: mol_type = genomic RNA
acaaggcatatggtactcagaga

SEQ ID NO: 2017 - RNA, 22 nt, Homo sapiens
  source 1..22: mol_type = genomic RNA
aaagagtcaagtcaaggccaga

SEQ ID NO: 2018 - RNA, 23 nt, Homo sapiens
  source 1..23: mol_type = genomic RNA
tgctgtgggacctctggccttga

SEQ ID NO: 2019 - RNA, 22 nt, Homo sapiens
  source 1..22: mol_type = genomic RNA
ccctaatccaacattactagtt

SEQ ID NO: 2020 - RNA, 22 nt, Homo sapiens
  source 1..22: mol_type = genomic RNA
agtagcagtcacatatacatat

SEQ ID NO: 2021 - RNA, 21 nt, Homo sapiens
  source 1..21: mol_type = genomic RNA
caagagaactaaaactggagt

SEQ ID NO: 2022 - RNA, 22 nt, Homo sapiens
  source 1..22: mol_type = genomic RNA
aggctccactttcagttctctt

SEQ ID NO: 2023 - RNA, 21 nt, Homo sapiens
  source 1..21: mol_type = genomic RNA
tctctgcctgctttttggcca

SEQ ID NO: 2024 - RNA, 22 nt, Homo sapiens
  source 1..22: mol_type = genomic RNA
atgcctatcaaatatctacctg

SEQ ID NO: 2025 - RNA, 21 nt, Homo sapiens
  source 1..21: mol_type = genomic RNA
acaggcagatatgtgataggc

SEQ ID NO: 2026 - RNA, 22 nt, Homo sapiens
  source 1..22: mol_type = genomic RNA
gccgaagctccaaggttcctcc

SEQ ID NO: 2027 - RNA, 23 nt, Homo sapiens
  source 1..23: mol_type = genomic RNA
agtggtctactcacatcagcctc

SEQ ID NO: 2028 - RNA, 22 nt, Homo sapiens
  source 1..22: mol_type = genomic RNA
tcccagctgtgcaacctgagca

SEQ ID NO: 2029 - RNA, 22 nt, Homo sapiens
  source 1..22: mol_type = genomic RNA
ctgcctcagtttccacacctga

SEQ ID NO: 2030 - RNA, 22 nt, Homo sapiens
  source 1..22: mol_type = genomic RNA
gtggctggtgctcgtatctaca

SEQ ID NO: 2031 - RNA, 22 nt, Homo sapiens
  source 1..22: mol_type = genomic RNA
tgcatctgccatacacccctta

SEQ ID NO: 2032 - RNA, 23 nt, Homo sapiens
  source 1..23: mol_type = genomic RNA
cccccattgctacagccgcctgt

SEQ ID NO: 2033 - RNA, 22 nt, Homo sapiens
  source 1..22: mol_type = genomic RNA
ccgggttatctacaagggaatt

SEQ ID NO: 2034 - RNA, 22 nt, Homo sapiens
  source 1..22: mol_type = genomic RNA
gacatcctgtggtctgcgcgta

SEQ ID NO: 2035 - RNA, 22 nt, Homo sapiens
  source 1..22: mol_type = genomic RNA
aagtgggctgggatccgggctg

SEQ ID NO: 2036 - RNA, 20 nt, Homo sapiens
  source 1..20: mol_type = genomic RNA
cagagcccgccccaacccac

SEQ ID NO: 2037 - RNA, 22 nt, Homo sapiens
  source 1..22: mol_type = genomic RNA
tatgatcctcagttgtgtgtaa

SEQ ID NO: 2038 - RNA, 21 nt, Homo sapiens
  source 1..21: mol_type = genomic RNA
atgtaatactgttatctgaaa

SEQ ID NO: 2039 - RNA, 22 nt, Homo sapiens
  source 1..22: mol_type = genomic RNA
atttcaggtaacagtattgctt

SEQ ID NO: 2040 - RNA, 23 nt, Homo sapiens
  source 1..23: mol_type = genomic RNA
cgccaagtgaagcctgggggcta

SEQ ID NO: 2041 - RNA, 23 nt, Homo sapiens
  source 1..23: mol_type = genomic RNA
ccggagcagcaggccagcccgaa

SEQ ID NO: 2042 - RNA, 21 nt, Homo sapiens
  source 1..21: mol_type = genomic RNA
tctcggttggcctgctgcaca

SEQ ID NO: 2043 - RNA, 23 nt, Homo sapiens
  source 1..23: mol_type = genomic RNA
atatcaaccctctcctatgccct

SEQ ID NO: 2044 - RNA, 20 nt, Homo sapiens
  source 1..20: mol_type = genomic RNA
cccccgcctccgccgccgcc

SEQ ID NO: 2045 - RNA, 22 nt, Homo sapiens
  source 1..22: mol_type = genomic RNA
tgccctggaacggggctggcag

SEQ ID NO: 2046 - RNA, 23 nt, Homo sapiens
  source 1..23: mol_type = genomic RNA
ctaaggctaatgctgtactttgt

SEQ ID NO: 2047 - RNA, 23 nt, Homo sapiens
  source 1..23: mol_type = genomic RNA
gcattaaccttacaatgaccttt

SEQ ID NO: 2048 - RNA, 22 nt, Homo sapiens
  source 1..22: mol_type = genomic RNA
gtgaagtagtgcattagcctca

SEQ ID NO: 2049 - RNA, 24 nt, Homo sapiens
  source 1..24: mol_type = genomic RNA
acattaatcttcctgctctctata

SEQ ID NO: 2050 - RNA, 23 nt, Homo sapiens
  source 1..23: mol_type = genomic RNA
taaggttaattacgatgaagcac

SEQ ID NO: 2051 - RNA, 24 nt, Homo sapiens
  source 1..24: mol_type = genomic RNA
acaccctggatgcatgctttccac

SEQ ID NO: 2052 - RNA, 22 nt, Homo sapiens
  source 1..22: mol_type = genomic RNA
aggggttcaccgagcaacattc

SEQ ID NO: 2053 - RNA, 23 nt, Homo sapiens
  source 1..23: mol_type = genomic RNA
atgcaaagttgctcgggtaacct

SEQ ID NO: 2054 - RNA, 21 nt, Homo sapiens
  source 1..21: mol_type = genomic RNA
acaggccatctgtgttatatt

SEQ ID NO: 2055 - RNA, 22 nt, Homo sapiens
  source 1..22: mol_type = genomic RNA
ggttagtggaccgtgttacata

SEQ ID NO: 2056 - RNA, 21 nt, Homo sapiens
  source 1..21: mol_type = genomic RNA
cgtacgctatacggtctacta

SEQ ID NO: 2057 - RNA, 23 nt, Homo sapiens
  source 1..23: mol_type = genomic RNA
acggctagtggaccaggtgaagt

SEQ ID NO: 2058 - RNA, 23 nt, Homo sapiens
  source 1..23: mol_type = genomic RNA
gcgcccaattaatgtctgttgat

SEQ ID NO: 2059 - RNA, 22 nt, Homo sapiens
  source 1..22: mol_type = genomic RNA
gccttctgaccctaagtccagt

SEQ ID NO: 2060 - RNA, 23 nt, Homo sapiens
  source 1..23: mol_type = genomic RNA
actgaggggcctcagaccgagct

SEQ ID NO: 2061 - RNA, 23 nt, Homo sapiens
  source 1..23: mol_type = genomic RNA
aaagtctcgctctctgcccctca

SEQ ID NO: 2062 - RNA, 21 nt, Homo sapiens
  source 1..21: mol_type = genomic RNA
atagcagcgcctcacgttttg

SEQ ID NO: 2063 - RNA, 22 nt, Homo sapiens
  source 1..22: mol_type = genomic RNA
ttcaaaacatgaattgctgctg

SEQ ID NO: 2064 - RNA, 17 nt, Homo sapiens
  source 1..17: mol_type = genomic RNA
ttggcccttttctcagg

SEQ ID NO: 2065 - RNA, 19 nt, Homo sapiens
  source 1..19: mol_type = genomic RNA
tggtgctgactcagtggcc

SEQ ID NO: 2066 - RNA, 18 nt, Homo sapiens
  source 1..18: mol_type = genomic RNA
accccctggacatgccct

SEQ ID NO: 2067 - RNA, 22 nt, Homo sapiens
  source 1..22: mol_type = genomic RNA
gggcggacacgacattcccgat

SEQ ID NO: 2068 - RNA, 23 nt, Homo sapiens
  source 1..23: mol_type = genomic RNA
gagatggtggagtagctccaggc

SEQ ID NO: 2069 - RNA, 17 nt, Homo sapiens
  source 1..17: mol_type = genomic RNA
tccatctctgaacactg

SEQ ID NO: 2070 - RNA, 23 nt, Homo sapiens
  source 1..23: mol_type = genomic RNA
tcaacgggagtgatcgtgtcatt

SEQ ID NO: 2071 - RNA, 18 nt, Homo sapiens
  source 1..18: mol_type = genomic RNA
accttcatcaggtcagat

SEQ ID NO: 2072 - RNA, 18 nt, Homo sapiens
  source 1..18: mol_type = genomic RNA
ctcagtccccacctctgg

SEQ ID NO: 2073 - RNA, 17 nt, Homo sapiens
  source 1..17: mol_type = genomic RNA
ccaaggcggtggcgggg

SEQ ID NO: 2074 - RNA, 22 nt, Homo sapiens
  source 1..22: mol_type = genomic RNA
tcctgacccctagacccaactg

SEQ ID NO: 2075 - RNA, 19 nt, Homo sapiens
  source 1..19: mol_type = genomic RNA
tgggactccatgccccaag

SEQ ID NO: 2076 - RNA, 16 nt, Homo sapiens
  source 1..16: mol_type = genomic RNA
tgggtccctgtttcct

SEQ ID NO: 2077 - RNA, 17 nt, Homo sapiens
  source 1..17: mol_type = genomic RNA
caggtagtctgaatgtc

SEQ ID NO: 2078 - RNA, 18 nt, Homo sapiens
  source 1..18: mol_type = genomic RNA
ggccaaggcacttagaat

SEQ ID NO: 2079 - RNA, 17 nt, Homo sapiens
  source 1..17: mol_type = genomic RNA
aatgaccatgactgagt

SEQ ID NO: 2080 - RNA, 19 nt, Homo sapiens
  source 1..19: mol_type = genomic RNA
cccagagctgagcccacag

SEQ ID NO: 2081 - RNA, 16 nt, Homo sapiens
  source 1..16: mol_type = genomic RNA
ggccaaggcctcctag

SEQ ID NO: 2082 - RNA, 16 nt, Homo sapiens
  source 1..16: mol_type = genomic RNA
gtgccaccgagctgga

SEQ ID NO: 2083 - RNA, 21 nt, Homo sapiens
  source 1..21: mol_type = genomic RNA
cacatcctgagaggaggagcc

SEQ ID NO: 2084 - RNA, 21 nt, Homo sapiens
  source 1..21: mol_type = genomic RNA
gccagggctgtctgtgcctgc

SEQ ID NO: 2085 - RNA, 20 nt, Homo sapiens
  source 1..20: mol_type = genomic RNA
gccctcccctgactccctga

SEQ ID NO: 2086 - RNA, 19 nt, Homo sapiens
  source 1..19: mol_type = genomic RNA
ccccaccttttcttccccc

SEQ ID NO: 2087 - RNA, 18 nt, Homo sapiens
  source 1..18: mol_type = genomic RNA
acaatcactagttgaatg

SEQ ID NO: 2088 - RNA, 18 nt, Homo sapiens
  source 1..18: mol_type = genomic RNA
ctgtccatcagagaacac

SEQ ID NO: 2089 - RNA, 18 nt, Homo sapiens
  source 1..18: mol_type = genomic RNA
cagggggagggactgctg

SEQ ID NO: 2090 - RNA, 17 nt, Homo sapiens
  source 1..17: mol_type = genomic RNA
aaagaagtggtaattgg

SEQ ID NO: 2091 - RNA, 17 nt, Homo sapiens
  source 1..17: mol_type = genomic RNA
gcacatgagtcactgag

SEQ ID NO: 2092 - RNA, 21 nt, Homo sapiens
  source 1..21: mol_type = genomic RNA
gtgtactgtgctcagaactgc

SEQ ID NO: 2093 - RNA, 18 nt, Homo sapiens
  source 1..18: mol_type = genomic RNA
caagggcaaaccccctag

SEQ ID NO: 2094 - RNA, 16 nt, Homo sapiens
  source 1..16: mol_type = genomic RNA
gaagccgggaggagag

SEQ ID NO: 2095 - RNA, 21 nt, Homo sapiens
  source 1..21: mol_type = genomic RNA
gctctgctcagaactacactc

SEQ ID NO: 2096 - RNA, 18 nt, Homo sapiens
  source 1..18: mol_type = genomic RNA
cccccctccccgggaccc

SEQ ID NO: 2097 - RNA, 18 nt, Homo sapiens
  source 1..18: mol_type = genomic RNA
tcctggatgcaaatttta

SEQ ID NO: 2098 - RNA, 17 nt, Homo sapiens
  source 1..17: mol_type = genomic RNA
aaactcgctgagcccca

SEQ ID NO: 2099 - RNA, 18 nt, Homo sapiens
  source 1..18: mol_type = genomic RNA
atggggtgatgtgagccc

SEQ ID NO: 2100 - RNA, 18 nt, Homo sapiens
  source 1..18: mol_type = genomic RNA
atgagtcggactcgccgc

SEQ ID NO: 2101 - RNA, 17 nt, Homo sapiens
  source 1..17: mol_type = genomic RNA
ggtaccaggagtggggt

SEQ ID NO: 2102 - RNA, 19 nt, Homo sapiens
  source 1..19: mol_type = genomic RNA
aaagtgccctcaagggaga

SEQ ID NO: 2103 - RNA, 17 nt, Homo sapiens
  source 1..17: mol_type = genomic RNA
ggaaactcagcagacaa

SEQ ID NO: 2104 - RNA, 19 nt, Homo sapiens
  source 1..19: mol_type = genomic RNA
tgatagccctgcacaatgc

SEQ ID NO: 2105 - RNA, 22 nt, Homo sapiens
  source 1..22: mol_type = genomic RNA
acggttttaccagacagtatta

SEQ ID NO: 2106 - RNA, 19 nt, Homo sapiens
  source 1..19: mol_type = genomic RNA
gagggaagaaaggagggca

SEQ ID NO: 2107 - RNA, 16 nt, Homo sapiens
  source 1..16: mol_type = genomic RNA
agctgttcctgctgaa

SEQ ID NO: 2108 - RNA, 18 nt, Homo sapiens
  source 1..18: mol_type = genomic RNA
ccaaggccggcccagggg

SEQ ID NO: 2109 - RNA, 17 nt, Homo sapiens
  source 1..17: mol_type = genomic RNA
ctgttcctgtcaggctg

SEQ ID NO: 2110 - RNA, 17 nt, Homo sapiens
  source 1..17: mol_type = genomic RNA
ccctgctgtagactccc

SEQ ID NO: 2111 - RNA, 18 nt, Homo sapiens
  source 1..18: mol_type = genomic RNA
aaggaaaacattgcactg

SEQ ID NO: 2112 - RNA, 17 nt, Homo sapiens
  source 1..17: mol_type = genomic RNA
tgagcctgagcccacat

SEQ ID NO: 2113 - RNA, 16 nt, Homo sapiens
  source 1..16: mol_type = genomic RNA
cacagacaggaaggca

SEQ ID NO: 2114 - RNA, 22 nt, Homo sapiens
  source 1..22: mol_type = genomic RNA
ctgcctcctcctcctgtcccag

SEQ ID NO: 2115 - RNA, 18 nt, Homo sapiens
  source 1..18: mol_type = genomic RNA
gcctctcatgtcaccagc

SEQ ID NO: 2116 - RNA, 18 nt, Homo sapiens
  source 1..18: mol_type = genomic RNA
gaagtagtccagctccca

SEQ ID NO: 2117 - RNA, 20 nt, Homo sapiens
  source 1..20: mol_type = genomic RNA
tcacaagtgaagtagtggga

SEQ ID NO: 2118 - RNA, 18 nt, Homo sapiens
  source 1..18: mol_type = genomic RNA
ctcgctgagccacactgg

SEQ ID NO: 2119 - RNA, 17 nt, Homo sapiens
  source 1..17: mol_type = genomic RNA
ctgtcctcagctcagaa

SEQ ID NO: 2120 - RNA, 17 nt, Homo sapiens
  source 1..17: mol_type = genomic RNA
tgccctggacatgccgg

SEQ ID NO: 2121 - RNA, 18 nt, Homo sapiens
  source 1..18: mol_type = genomic RNA
gaactggaggtgtctagg

SEQ ID NO: 2122 - RNA, 17 nt, Homo sapiens
  source 1..17: mol_type = genomic RNA
tactgcctttctctcca

SEQ ID NO: 2123 - RNA, 19 nt, Homo sapiens
  source 1..19: mol_type = genomic RNA
ggaaacaggaaaaaacatt

SEQ ID NO: 2124 - RNA, 18 nt, Homo sapiens
  source 1..18: mol_type = genomic RNA
aagaagaaactccaggga

SEQ ID NO: 2125 - RNA, 18 nt, Homo sapiens
  source 1..18: mol_type = genomic RNA
tggaatcctagactccag

SEQ ID NO: 2126 - RNA, 16 nt, Homo sapiens
  source 1..16: mol_type = genomic RNA
gggacatgaatgctgc

SEQ ID NO: 2127 - RNA, 18 nt, Homo sapiens
  source 1..18: mol_type = genomic RNA
cacactcagctctctttc

SEQ ID NO: 2128 - RNA, 19 nt, Homo sapiens
  source 1..19: mol_type = genomic RNA
tggggacaggaacaaggcc

SEQ ID NO: 2129 - RNA, 20 nt, Homo sapiens
  source 1..20: mol_type = genomic RNA
gggtttggggccagggggct

SEQ ID NO: 2130 - RNA, 22 nt, Homo sapiens
  source 1..22: mol_type = genomic RNA
agaagccctgcaagacgacctg

SEQ ID NO: 2131 - RNA, 18 nt, Homo sapiens
  source 1..18: mol_type = genomic RNA
ctgtcccatttcccagag

SEQ ID NO: 2132 - RNA, 18 nt, Homo sapiens
  source 1..18: mol_type = genomic RNA
gtccagctcagaaagcgg

SEQ ID NO: 2133 - RNA, 21 nt, Homo sapiens
  source 1..21: mol_type = genomic RNA
tgcatgacggcctgcaagaca

SEQ ID NO: 2134 - RNA, 17 nt, Homo sapiens
  source 1..17: mol_type = genomic RNA
caccagctagcctcacc

SEQ ID NO: 2135 - RNA, 17 nt, Homo sapiens
  source 1..17: mol_type = genomic RNA
aaactccctggcaatgt

SEQ ID NO: 2136 - RNA, 17 nt, Homo sapiens
  source 1..17: mol_type = genomic RNA
agcatgtacccacagtg

SEQ ID NO: 2137 - RNA, 17 nt, Homo sapiens
  source 1..17: mol_type = genomic RNA
gtggctttgctcaggga

SEQ ID NO: 2138 - RNA, 18 nt, Homo sapiens
  source 1..18: mol_type = genomic RNA
aggaagctacagaatccc

SEQ ID NO: 2139 - RNA, 21 nt, Homo sapiens
  source 1..21: mol_type = genomic RNA
cgcagggcggtccaccgctaa

SEQ ID NO: 2140 - RNA, 21 nt, Homo sapiens
  source 1..21: mol_type = genomic RNA
ccccacgcgctgagcccacag

SEQ ID NO: 2141 - RNA, 18 nt, Homo sapiens
  source 1..18: mol_type = genomic RNA
tctgaggctgtggggctg

SEQ ID NO: 2142 - RNA, 21 nt, Homo sapiens
  source 1..21: mol_type = genomic RNA
agacatggaggagccatccag

SEQ ID NO: 2143 - RNA, 20 nt, Homo sapiens
  source 1..20: mol_type = genomic RNA
ttaaggttagggtctcaggg

SEQ ID NO: 2144 - RNA, 18 nt, Homo sapiens
  source 1..18: mol_type = genomic RNA
tcactgagacaagtgcaa

SEQ ID NO: 2145 - RNA, 23 nt, Homo sapiens
  source 1..23: mol_type = genomic RNA
ccacccaatgacctactccaaga

SEQ ID NO: 2146 - RNA, 20 nt, Homo sapiens
  source 1..20: mol_type = genomic RNA
gtctgggagacagaggaaca

SEQ ID NO: 2147 - RNA, 19 nt, Homo sapiens
  source 1..19: mol_type = genomic RNA
ccagtcccccatgcaagcc

SEQ ID NO: 2148 - RNA, 17 nt, Homo sapiens
  source 1..17: mol_type = genomic RNA
aatcctgggaaaactgg

SEQ ID NO: 2149 - RNA, 19 nt, Homo sapiens
  source 1..19: mol_type = genomic RNA
gtggaactagggtctcagg

SEQ ID NO: 2150 - RNA, 22 nt, Homo sapiens
  source 1..22: mol_type = genomic RNA
acaccgaggagcccatcatgat

SEQ ID NO: 2151 - RNA, 19 nt, Homo sapiens
  source 1..19: mol_type = genomic RNA
gcaaggctctgatctgagg

SEQ ID NO: 2152 - RNA, 18 nt, Homo sapiens
  source 1..18: mol_type = genomic RNA
ccctccgggaagcccacc

SEQ ID NO: 2153 - RNA, 18 nt, Homo sapiens
  source 1..18: mol_type = genomic RNA
ctgctgagtcctgcagtg

SEQ ID NO: 2154 - RNA, 17 nt, Homo sapiens
  source 1..17: mol_type = genomic RNA
tgcagtctcctccctca

SEQ ID NO: 2155 - RNA, 18 nt, Homo sapiens
  source 1..18: mol_type = genomic RNA
ccatcttccttcagcctc

SEQ ID NO: 2156 - RNA, 22 nt, Homo sapiens
  source 1..22: mol_type = genomic RNA
ctcagctacagacatcagtgac

SEQ ID NO: 2157 - RNA, 22 nt, Homo sapiens
  source 1..22: mol_type = genomic RNA
tagctcctttccacagacaggt

SEQ ID NO: 2158 - RNA, 21 nt, Homo sapiens
  source 1..21: mol_type = genomic RNA
tgggtacttcctgatgctttt

SEQ ID NO: 2159 - RNA, 21 nt, Homo sapiens
  source 1..21: mol_type = genomic RNA
ttgttgctttttggtgcctat

SEQ ID NO: 2160 - RNA, 22 nt, Homo sapiens
  source 1..22: mol_type = genomic RNA
gcatgggaacaaaaaggcaact

SEQ ID NO: 2161 - RNA, 22 nt, Homo sapiens
  source 1..22: mol_type = genomic RNA
tagtccattttgagttaactct

SEQ ID NO: 2162 - RNA, 22 nt, Homo sapiens
  source 1..22: mol_type = genomic RNA
atggtcctgctgaatcccaaca

SEQ ID NO: 2163 - RNA, 17 nt, Homo sapiens
  source 1..17: mol_type = genomic RNA
aaagtacgtccatcttc

SEQ ID NO: 2164 - RNA, 21 nt, Homo sapiens
  source 1..21: mol_type = genomic RNA
actcttcagactctattcaga

SEQ ID NO: 2165 - RNA, 22 nt, Homo sapiens
  source 1..22: mol_type = genomic RNA
gctccatgttcccgtctccttg

SEQ ID NO: 2166 - RNA, 20 nt, Homo sapiens
  source 1..20: mol_type = genomic RNA
cgcctctcagcccagctttt

SEQ ID NO: 2167 - RNA, 18 nt, Homo sapiens
  source 1..18: mol_type = genomic RNA
ctccgctcactccagcct

SEQ ID NO: 2168 - RNA, 22 nt, Homo sapiens
  source 1..22: mol_type = genomic RNA
accttctagttttcagagtcgc

SEQ ID NO: 2169 - RNA, 20 nt, Homo sapiens
  source 1..20: mol_type = genomic RNA
aggcatcttgcagagtcttt

SEQ ID NO: 2170 - RNA, 21 nt, Homo sapiens
  source 1..21: mol_type = genomic RNA
atgtcccacccccactcctgt

SEQ ID NO: 2171 - RNA, 21 nt, Homo sapiens
  source 1..21: mol_type = genomic RNA
acaggagtggggggtgggacg

SEQ ID NO: 2172 - RNA, 18 nt, Homo sapiens
  source 1..18: mol_type = genomic RNA
ttctactttacttctcct

SEQ ID NO: 2173 - RNA, 22 nt, Homo sapiens
  source 1..22: mol_type = genomic RNA
cctctgtgtgagctctggccat

SEQ ID NO: 2174 - RNA, 21 nt, Homo sapiens
  source 1..21: mol_type = genomic RNA
atccacttctgcctgtcctgc

SEQ ID NO: 2175 - RNA, 22 nt, Homo sapiens
  source 1..22: mol_type = genomic RNA
ttgtccacttcttcctgccctg

SEQ ID NO: 2176 - RNA, 22 nt, Homo sapiens
  source 1..22: mol_type = genomic RNA
ggcagggcaggcagaagtggac

SEQ ID NO: 2177 - RNA, 21 nt, Homo sapiens
  source 1..21: mol_type = genomic RNA
aacctttgtaccctgagccca

SEQ ID NO: 2178 - RNA, 21 nt, Homo sapiens
  source 1..21: mol_type = genomic RNA
actgtcttttctaagcctgtg

SEQ ID NO: 2179 - RNA, 22 nt, Homo sapiens
  source 1..22: mol_type = genomic RNA
atgcctccaaggtatcagtcac

SEQ ID NO: 2180 - RNA, 22 nt, Homo sapiens
  source 1..22: mol_type = genomic RNA
caagccagcaagccccacgaca

SEQ ID NO: 2181 - RNA, 17 nt, Homo sapiens
  source 1..17: mol_type = genomic RNA
tacaatctcctccctgt

SEQ ID NO: 2182 - RNA, 17 nt, Homo sapiens
  source 1..17: mol_type = genomic RNA
cctccctcttgtccggc

SEQ ID NO: 2183 - RNA, 17 nt, Homo sapiens
  source 1..17: mol_type = genomic RNA
aaaacccacgcctccaa

SEQ ID NO: 2184 - RNA, 18 nt, Homo sapiens
  source 1..18: mol_type = genomic RNA
cgcctcttccaactcgag

SEQ ID NO: 2185 - RNA, 21 nt, Homo sapiens
  source 1..21: mol_type = genomic RNA
tggattgtttcttttgccgtg

SEQ ID NO: 2186 - RNA, 22 nt, Homo sapiens
  source 1..22: mol_type = genomic RNA
tgcacggcaaaagaaacaatct

SEQ ID NO: 2187 - RNA, 22 nt, Homo sapiens
  source 1..22: mol_type = genomic RNA
acccatgtcactgccagccctg

SEQ ID NO: 2188 - RNA, 22 nt, Homo sapiens
  source 1..22: mol_type = genomic RNA
gccaagggaatggcagggaaat

SEQ ID NO: 2189 - RNA, 17 nt, Homo sapiens
  source 1..17: mol_type = genomic RNA
aaacaacagcccccacc

SEQ ID NO: 2190 - RNA, 20 nt, Homo sapiens
  source 1..20: mol_type = genomic RNA
tacccctagaccaaggagcc

SEQ ID NO: 2191 - RNA, 22 nt, Homo sapiens
  source 1..22: mol_type = genomic RNA
tgcctcgcgcagccccgggacg

SEQ ID NO: 2192 - RNA, 22 nt, Homo sapiens
  source 1..22: mol_type = genomic RNA
tcaccacttctccaaatcccca

SEQ ID NO: 2193 - RNA, 17 nt, Homo sapiens
  source 1..17: mol_type = genomic RNA
tgtcctcagctctacca

SEQ ID NO: 2194 - RNA, 23 nt, Homo sapiens
  source 1..23: mol_type = genomic RNA
atcacttaaggccaagaattcaa

SEQ ID NO: 2195 - RNA, 20 nt, Homo sapiens
  source 1..20: mol_type = genomic RNA
aaccgctacagaccaagctc

SEQ ID NO: 2196 - RNA, 20 nt, Homo sapiens
  source 1..20: mol_type = genomic RNA
tggtgccgtgactcggatcc

SEQ ID NO: 2197 - RNA, 17 nt, Homo sapiens
  source 1..17: mol_type = genomic RNA
aaaaacacacacaccct

SEQ ID NO: 2198 - RNA, 17 nt, Homo sapiens
  source 1..17: mol_type = genomic RNA
aaaaggaagccaccagg

SEQ ID NO: 2199 - RNA, 22 nt, Homo sapiens
  source 1..22: mol_type = genomic RNA
tacgccagtcaataccttgtga

SEQ ID NO: 2200 - RNA, 19 nt, Homo sapiens
  source 1..19: mol_type = genomic RNA
ttcttccacacctacctct

SEQ ID NO: 2201 - RNA, 22 nt, Homo sapiens
  source 1..22: mol_type = genomic RNA
ctccacctcctccgcctcctgg

SEQ ID NO: 2202 - RNA, 22 nt, Homo sapiens
  source 1..22: mol_type = genomic RNA
aaggtaaattcacaaccactat

SEQ ID NO: 2203 - RNA, 23 nt, Homo sapiens
  source 1..23: mol_type = genomic RNA
gcctagccctactagtctcaatc

SEQ ID NO: 2204 - RNA, 23 nt, Homo sapiens
  source 1..23: mol_type = genomic RNA
ttcccaagccaccctccgtgtca

SEQ ID NO: 2205 - RNA, 17 nt, Homo sapiens
  source 1..17: mol_type = genomic RNA
ggccccaccccagtctc

SEQ ID NO: 2206 - RNA, 21 nt, Homo sapiens
  source 1..21: mol_type = genomic RNA
tattgcatctatccaaacctt

SEQ ID NO: 2207 - RNA, 22 nt, Homo sapiens
  source 1..22: mol_type = genomic RNA
tcccctggtcagactacttgag

SEQ ID NO: 2208 - RNA, 18 nt, Homo sapiens
  source 1..18: mol_type = genomic RNA
ccccgccggcccgcaccc

SEQ ID NO: 2209 - RNA, 22 nt, Homo sapiens
  source 1..22: mol_type = genomic RNA
aagcccataactaccgccgcca

SEQ ID NO: 2210 - RNA, 18 nt, Homo sapiens
  source 1..18: mol_type = genomic RNA
atctcatccttctgctct

SEQ ID NO: 2211 - RNA, 22 nt, Homo sapiens
  source 1..22: mol_type = genomic RNA
tccgagcgaccctagagggagc

SEQ ID NO: 2212 - RNA, 21 nt, Homo sapiens
  source 1..21: mol_type = genomic RNA
tctcggcttccacgtttgcca

SEQ ID NO: 2213 - RNA, 22 nt, Homo sapiens
  source 1..22: mol_type = genomic RNA
tgggaacttagtagaggtttaa

SEQ ID NO: 2214 - RNA, 18 nt, Homo sapiens
  source 1..18: mol_type = genomic RNA
ggtggggggtgttgtttt

SEQ ID NO: 2215 - RNA, 22 nt, Homo sapiens
  source 1..22: mol_type = genomic RNA
ctagtgctctccgttacaagta

SEQ ID NO: 2216 - RNA, 22 nt, Homo sapiens
  source 1..22: mol_type = genomic RNA
ttgtggctggtcatgaggctaa

SEQ ID NO: 2217 - RNA, 21 nt, Homo sapiens
  source 1..21: mol_type = genomic RNA
ttagtctcatgatcagacaca

SEQ ID NO: 2218 - RNA, 22 nt, Homo sapiens
  source 1..22: mol_type = genomic RNA
caagggaccaagcattcattat

SEQ ID NO: 2219 - RNA, 22 nt, Homo sapiens
  source 1..22: mol_type = genomic RNA
caggaaggatttagggacaggc

SEQ ID NO: 2220 - RNA, 22 nt, Homo sapiens
  source 1..22: mol_type = genomic RNA
ctattaaggacatttgtgattc

SEQ ID NO: 2221 - RNA, 22 nt, Homo sapiens
  source 1..22: mol_type = genomic RNA
attaaggacatttgtgattgat

SEQ ID NO: 2222 - RNA, 17 nt, Homo sapiens
  source 1..17: mol_type = genomic RNA
gaggctgagctgaggag

SEQ ID NO: 2223 - RNA, 22 nt, Homo sapiens
  source 1..22: mol_type = genomic RNA
cgcgcggccgtgctcggagcag

SEQ ID NO: 2224 - RNA, 22 nt, Homo sapiens
  source 1..22: mol_type = genomic RNA
ttgcatatgtaggatgtcccat

SEQ ID NO: 2225 - RNA, 21 nt, Homo sapiens
  source 1..21: mol_type = genomic RNA
agccaagtggaagttacttta

SEQ ID NO: 2226 - RNA, 17 nt, Homo sapiens
  source 1..17: mol_type = genomic RNA
ggagtgggctggtggtt

SEQ ID NO: 2227 - RNA, 22 nt, Homo sapiens
  source 1..22: mol_type = genomic RNA
tttctatttctcagtggggctc

SEQ ID NO: 2228 - RNA, 22 nt, Homo sapiens
  source 1..22: mol_type = genomic RNA
aacccagtgggctatggaaatg

SEQ ID NO: 2229 - RNA, 17 nt, Homo sapiens
  source 1..17: mol_type = genomic RNA
ggggtggtctgttgttg

SEQ ID NO: 2230 - RNA, 20 nt, Homo sapiens
  source 1..20: mol_type = genomic RNA
aaaaggcgggagaagcccca

SEQ ID NO: 2231 - RNA, 20 nt, Homo sapiens
  source 1..20: mol_type = genomic RNA
taacggccgcggtaccctaa

SEQ ID NO: 2232 - RNA, 17 nt, Homo sapiens
  source 1..17: mol_type = genomic RNA
gctgggcgaggctggca

SEQ ID NO: 2233 - RNA, 19 nt, Homo sapiens
  source 1..19: mol_type = genomic RNA
agagctggctgaagggcag

SEQ ID NO: 2234 - RNA, 18 nt, Homo sapiens
  source 1..18: mol_type = genomic RNA
agggggcgggctccggcg

SEQ ID NO: 2235 - RNA, 21 nt, Homo sapiens
  source 1..21: mol_type = genomic RNA
tggggctagtgatgcaggacg

SEQ ID NO: 2236 - RNA, 22 nt, Homo sapiens
  source 1..22: mol_type = genomic RNA
tctggtaagagatttgggcata

SEQ ID NO: 2237 - RNA, 22 nt, Homo sapiens
  source 1..22: mol_type = genomic RNA
aatgtggactggtgtgaccaaa

SEQ ID NO: 2238 - RNA, 17 nt, Homo sapiens
  source 1..17: mol_type = genomic RNA
ggggctgggcgcgcgcc

SEQ ID NO: 2239 - RNA, 21 nt, Homo sapiens
  source 1..21: mol_type = genomic RNA
agaaggcctttccatctctgt

SEQ ID NO: 2240 - RNA, 22 nt, Homo sapiens
  source 1..22: mol_type = genomic RNA
ccagactgtggctgaccagagg

SEQ ID NO: 2241 - RNA, 21 nt, Homo sapiens
  source 1..21: mol_type = genomic RNA
aatgtaaacaggctttttgct

SEQ ID NO: 2242 - RNA, 22 nt, Homo sapiens
  source 1..22: mol_type = genomic RNA
gaggaaactgaagctgagaggg

SEQ ID NO: 2243 - RNA, 17 nt, Homo sapiens
  source 1..17: mol_type = genomic RNA
ctccgggacggctgggc

SEQ ID NO: 2244 - RNA, 22 nt, Homo sapiens
  source 1..22: mol_type = genomic RNA
tgggctggcagggcaagtgctg

SEQ ID NO: 2245 - RNA, 17 nt, Homo sapiens
  source 1..17: mol_type = genomic RNA
aagactgagaggaggga

SEQ ID NO: 2246 - RNA, 22 nt, Homo sapiens
  source 1..22: mol_type = genomic RNA
tggcagtgtattgttagctggt

SEQ ID NO: 2247 - RNA, 22 nt, Homo sapiens
  source 1..22: mol_type = genomic RNA
cagccacaactaccctgccact

SEQ ID NO: 2248 - RNA, 22 nt, Homo sapiens
  source 1..22: mol_type = genomic RNA
aggcagtgtattgttagctggc

SEQ ID NO: 2249 - RNA, 23 nt, Homo sapiens
  source 1..23: mol_type = genomic RNA
ttgctagttgcactcctctctgt

SEQ ID NO: 2250 - RNA, 25 nt, Homo sapiens
  source 1..25: mol_type = genomic RNA
taggcagtgtattgctagcggctgt

SEQ ID NO: 2251 - RNA, 17 nt, Homo sapiens
  source 1..17: mol_type = genomic RNA
tgaggtagtagtttctt

SEQ ID NO: 2252 - RNA, 21 nt, Homo sapiens
  source 1..21: mol_type = genomic RNA
tatgtgacctcggatgaatca

SEQ ID NO: 2253 - RNA, 22 nt, Homo sapiens
  source 1..22: mol_type = genomic RNA
gctgatgatgatggtgctgaag

SEQ ID NO: 2254 - RNA, 22 nt, Homo sapiens
  source 1..22: mol_type = genomic RNA
tttaagcaggaaatagaattta

SEQ ID NO: 2255 - RNA, 22 nt, Homo sapiens
  source 1..22: mol_type = genomic RNA
tgtgacaatagagatgaacatg

SEQ ID NO: 2256 - RNA, 18 nt, Homo sapiens
  source 1..18: mol_type = genomic RNA
aggctgggctgggacgga

SEQ ID NO: 2257 - RNA, 20 nt, Homo sapiens
  source 1..20: mol_type = genomic RNA
aaatgggtggtctgaggcaa

SEQ ID NO: 2258 - RNA, 20 nt, Homo sapiens
  source 1..20: mol_type = genomic RNA
ctgggttgggctgggctggg

SEQ ID NO: 2259 - RNA, 17 nt, Homo sapiens
  source 1..17: mol_type = genomic RNA
gcggggctgggcgcgcg

SEQ ID NO: 2260 - RNA, 22 nt, Homo sapiens
  source 1..22: mol_type = genomic RNA
actaaaggatatagaaggtttt

SEQ ID NO: 2261 - RNA, 22 nt, Homo sapiens
  source 1..22: mol_type = genomic RNA
attggggacattttgcattcat

SEQ ID NO: 2262 - RNA, 22 nt, Homo sapiens
  source 1..22: mol_type = genomic RNA
ttttgcgatgtgttcctaatat

SEQ ID NO: 2263 - RNA, 22 nt, Homo sapiens
  source 1..22: mol_type = genomic RNA
ttgggatcattttgcatccata

SEQ ID NO: 2264 - RNA, 22 nt, Homo sapiens
  source 1..22: mol_type = genomic RNA
ttttgcaatatgttcctgaata

SEQ ID NO: 2265 - RNA, 22 nt, Homo sapiens
  source 1..22: mol_type = genomic RNA
tgagggagtaggatgtatggtt

SEQ ID NO: 2266 - RNA, 22 nt, Homo sapiens
  source 1..22: mol_type = genomic RNA
gaagaactgttgcatttgccct

SEQ ID NO: 2267 - RNA, 22 nt, Homo sapiens
  source 1..22: mol_type = genomic RNA
cagggcctcactgtatcgccca

SEQ ID NO: 2268 - RNA, 22 nt, Homo sapiens
  source 1..22: mol_type = genomic RNA
agactgacggctggaggcccat

SEQ ID NO: 2269 - RNA, 18 nt, Homo sapiens
  source 1..18: mol_type = genomic RNA
acaggcaggattggggaa

SEQ ID NO: 2270 - RNA, 22 nt, Homo sapiens
  source 1..22: mol_type = genomic RNA
aggactggactcccggcagccc

SEQ ID NO: 2271 - RNA, 17 nt, Homo sapiens
  source 1..17: mol_type = genomic RNA
gggagaagggtcggggc

SEQ ID NO: 2272 - RNA, 25 nt, Homo sapiens
  source 1..25: mol_type = genomic RNA
aaatatgatgaaactcacagctgag

SEQ ID NO: 2273 - RNA, 26 nt, Homo sapiens
  source 1..26: mol_type = genomic RNA
gctcagggatgataactgtgctgaga

SEQ ID NO: 2274 - RNA, 18 nt, Homo sapiens
  source 1..18: mol_type = genomic RNA
cagcagtgcgcagggctg

SEQ ID NO: 2275 - RNA, 22 nt, Homo sapiens
  source 1..22: mol_type = genomic RNA
aaaccgttaccattactgagtt

SEQ ID NO: 2276 - RNA, 22 nt, Homo sapiens
  source 1..22: mol_type = genomic RNA
tagcaagagaaccattaccatt

SEQ ID NO: 2277 - RNA, 22 nt, Homo sapiens
  source 1..22: mol_type = genomic RNA
ttggacagaaaacacgcaggaa

SEQ ID NO: 2278 - RNA, 20 nt, Homo sapiens
  source 1..20: mol_type = genomic RNA
cctgcgtgttttctgtccaa

SEQ ID NO: 2279 - RNA, 22 nt, Homo sapiens
  source 1..22: mol_type = genomic RNA
tttggacagaaaacacgcaggt

SEQ ID NO: 2280 - RNA, 20 nt, Homo sapiens
  source 1..20: mol_type = genomic RNA
cctgcgtgttttctgtccaa

SEQ ID NO: 2281 - RNA, 22 nt, Homo sapiens
  source 1..22: mol_type = genomic RNA
gctaaggaagtcctgtgctcag

SEQ ID NO: 2282 - RNA, 21 nt, Homo sapiens
  source 1..21: mol_type = genomic RNA
tgactctgcctgtaggccggt

SEQ ID NO: 2283 - RNA, 21 nt, Homo sapiens
  source 1..21: mol_type = genomic RNA
gaccgagagggcctcggctgt

SEQ ID NO: 2284 - RNA, 22 nt, Homo sapiens
  source 1..22: mol_type = genomic RNA
ctcatctgcaaagaagtaagtg

SEQ ID NO: 2285 - RNA, 22 nt, Homo sapiens
  source 1..22: mol_type = genomic RNA
tgagacaggcttatgctgctat

SEQ ID NO: 2286 - RNA, 22 nt, Homo sapiens
  source 1..22: mol_type = genomic RNA
atagcagcatgaacctgtctca

SEQ ID NO: 2287 - RNA, 20 nt, Homo sapiens
  source 1..20: mol_type = genomic RNA
gagacaggttcatgctgcta

SEQ ID NO: 2288 - RNA, 21 nt, Homo sapiens
  source 1..21: mol_type = genomic RNA
atagcagcataagcctgtctc

SEQ ID NO: 2289 - RNA, 21 nt, Homo sapiens
  source 1..21: mol_type = genomic RNA
ggggggatgtgcatgctggtt

SEQ ID NO: 2290 - RNA, 22 nt, Homo sapiens
  source 1..22: mol_type = genomic RNA
aactgtttgcagaggaaactga

SEQ ID NO: 2291 - RNA, 22 nt, Homo sapiens
  source 1..22: mol_type = genomic RNA
gctgacagcagggctggccgct

SEQ ID NO: 2292 - RNA, 22 nt, Homo sapiens
  source 1..22: mol_type = genomic RNA
tggtctgcaaagagatgactgt

SEQ ID NO: 2293 - RNA, 22 nt, Homo sapiens
  source 1..22: mol_type = genomic RNA
tcattatatgtatgatctggac

SEQ ID NO: 2294 - RNA, 21 nt, Homo sapiens
  source 1..21: mol_type = genomic RNA
attggactgctgatggcccgt

SEQ ID NO: 2295 - RNA, 22 nt, Homo sapiens
  source 1..22: mol_type = genomic RNA
aggccatcagcagtccaatgaa

SEQ ID NO: 2296 - RNA, 18 nt, Homo sapiens
  source 1..18: mol_type = genomic RNA
cccagcaggacgggagcg

SEQ ID NO: 2297 - RNA, 17 nt, Homo sapiens
  source 1..17: mol_type = genomic RNA
atggagaaggcttctga

SEQ ID NO: 2298 - RNA, 17 nt, Homo sapiens
  source 1..17: mol_type = genomic RNA
ccccggggagcccggcg

SEQ ID NO: 2299 - RNA, 22 nt, Homo sapiens
  source 1..22: mol_type = genomic RNA
tggaaggaggttgccggacgct

SEQ ID NO: 2300 - RNA, 17 nt, Homo sapiens
  source 1..17: mol_type = genomic RNA
ggatggaggaggggtct

SEQ ID NO: 2301 - RNA, 17 nt, Homo sapiens
  source 1..17: mol_type = genomic RNA
gtggacctggctgggac

SEQ ID NO: 2302 - RNA, 21 nt, Homo sapiens
  source 1..21: mol_type = genomic RNA
tcgtgcatatatctaccacat

SEQ ID NO: 2303 - RNA, 21 nt, Homo sapiens
  source 1..21: mol_type = genomic RNA
tgtggtagatatatgcacgat

SEQ ID NO: 2304 - RNA, 22 nt, Homo sapiens
  source 1..22: mol_type = genomic RNA
tgagccgagctgagcttagctg

SEQ ID NO: 2305 - RNA, 22 nt, Homo sapiens
  source 1..22: mol_type = genomic RNA
gagcttggatgagctgggctga

SEQ ID NO: 2306 - RNA, 22 nt, Homo sapiens
  source 1..22: mol_type = genomic RNA
gctgaactgggctgagctgggc

SEQ ID NO: 2307 - RNA, 21 nt, Homo sapiens
  source 1..21: mol_type = genomic RNA
ttagtcctgcctgtaggttta

SEQ ID NO: 2308 - RNA, 23 nt, Homo sapiens
  source 1..23: mol_type = genomic RNA
tagtgcaatattgcttatagggt

SEQ ID NO: 2309 - RNA, 22 nt, Homo sapiens
  source 1..22: mol_type = genomic RNA
accctatcaatattgtctctgc

SEQ ID NO: 2310 - RNA, 21 nt, Homo sapiens
  source 1..21: mol_type = genomic RNA
gcagtccatgggcatatacac

SEQ ID NO: 2311 - RNA, 22 nt, Homo sapiens
  source 1..22: mol_type = genomic RNA
tatgtgcctttggactacatcg

SEQ ID NO: 2312 - RNA, 22 nt, Homo sapiens
  source 1..22: mol_type = genomic RNA
tgccgccctctcgctgctctag

SEQ ID NO: 2313 - RNA, 23 nt, Homo sapiens
  source 1..23: mol_type = genomic RNA
gagggcagcgtgggtgtggcgga

SEQ ID NO: 2314 - RNA, 22 nt, Homo sapiens
  source 1..22: mol_type = genomic RNA
aggagctagccaggcatatgca

SEQ ID NO: 2315 - RNA, 20 nt, Homo sapiens
  source 1..20: mol_type = genomic RNA
atatgcctggctagctcctc

SEQ ID NO: 2316 - RNA, 19 nt, Homo sapiens
  source 1..19: mol_type = genomic RNA
cggcgcgaccggcccgggg

SEQ ID NO: 2317 - RNA, 21 nt, Homo sapiens
  source 1..21: mol_type = genomic RNA
tcttgaagtcagaacccgcaa

SEQ ID NO: 2318 - RNA, 22 nt, Homo sapiens
  source 1..22: mol_type = genomic RNA
aactcgtgttcaaagcctttag

SEQ ID NO: 2319 - RNA, 22 nt, Homo sapiens
  source 1..22: mol_type = genomic RNA
tactaactgcagattcaagtga

SEQ ID NO: 2320 - RNA, 23 nt, Homo sapiens
  source 1..23: mol_type = genomic RNA
cctggacaccgctcagccggccg

SEQ ID NO: 2321 - RNA, 21 nt, Homo sapiens
  source 1..21: mol_type = genomic RNA
actcggctgcggtggacaagt

SEQ ID NO: 2322 - RNA, 20 nt, Homo sapiens
  source 1..20: mol_type = genomic RNA
tcactctcaccttgctttgc

SEQ ID NO: 2323 - RNA, 22 nt, Homo sapiens
  source 1..22: mol_type = genomic RNA
ttgctaagtaggctgagattga

SEQ ID NO: 2324 - RNA, 22 nt, Homo sapiens
  source 1..22: mol_type = genomic RNA
caccccctgtttcctggcccac

SEQ ID NO: 2325 - RNA, 23 nt, Homo sapiens
  source 1..23: mol_type = genomic RNA
tgggccagggagcagctggtggg

SEQ ID NO: 2326 - RNA, 24 nt, Homo sapiens
  source 1..24: mol_type = genomic RNA
tgcccatgccatacttttgcctca

SEQ ID NO: 2327 - RNA, 22 nt, Homo sapiens
  source 1..22: mol_type = genomic RNA
atggcatcgtcccctggtggct

SEQ ID NO: 2328 - RNA, 22 nt, Homo sapiens
  source 1..22: mol_type = genomic RNA
gacacatgaccataaatgctaa

SEQ ID NO: 2329 - RNA, 23 nt, Homo sapiens
  source 1..23: mol_type = genomic RNA
tggagagagaaaagagacagaag

SEQ ID NO: 2330 - RNA, 22 nt, Homo sapiens
  source 1..22: mol_type = genomic RNA
agacagtagttcttgcctggtt

SEQ ID NO: 2331 - RNA, 19 nt, Homo sapiens
  source 1..19: mol_type = genomic RNA
accaggcaagaaatattgt

SEQ ID NO: 2332 - RNA, 21 nt, Homo sapiens
  source 1..21: mol_type = genomic RNA
attgtccctctcccttcccag

SEQ ID NO: 2333 - RNA, 22 nt, Homo sapiens
  source 1..22: mol_type = genomic RNA
actgggaagaggagctgaggga

SEQ ID NO: 2334 - RNA, 23 nt, Homo sapiens
  source 1..23: mol_type = genomic RNA
gaagatggtgctgtgctgaggaa

SEQ ID NO: 2335 - RNA, 20 nt, Homo sapiens
  source 1..20: mol_type = genomic RNA
tgtgggactgcaaatgggag

SEQ ID NO: 2336 - RNA, 21 nt, Homo sapiens
  source 1..21: mol_type = genomic RNA
tctgaggcctgcctctcccca

SEQ ID NO: 2337 - RNA, 24 nt, Homo sapiens
  source 1..24: mol_type = genomic RNA
tgggcgaggggtgggctctcagag

SEQ ID NO: 2338 - RNA, 21 nt, Homo sapiens
  source 1..21: mol_type = genomic RNA
aggtagaatgaggcctgacat

SEQ ID NO: 2339 - RNA, 19 nt, Homo sapiens
  source 1..19: mol_type = genomic RNA
tcaggcctctttctacctt

SEQ ID NO: 2340 - RNA, 20 nt, Homo sapiens
  source 1..20: mol_type = genomic RNA
cggggtgggtgaggtcgggc

SEQ ID NO: 2341 - RNA, 22 nt, Homo sapiens
  source 1..22: mol_type = genomic RNA
gttctgttaacccatcccctca

SEQ ID NO: 2342 - RNA, 22 nt, Homo sapiens
  source 1..22: mol_type = genomic RNA
aggggactggttaatagaacta

SEQ ID NO: 2343 - RNA, 23 nt, Homo sapiens
  source 1..23: mol_type = genomic RNA
tggagttaagggttgcttggaga

SEQ ID NO: 2344 - RNA, 22 nt, Homo sapiens
  source 1..22: mol_type = genomic RNA
tctctgagcaaggcttaacacc

SEQ ID NO: 2345 - RNA, 22 nt, Homo sapiens
  source 1..22: mol_type = genomic RNA
tgtgggatctggaggcatctgg

SEQ ID NO: 2346 - RNA, 21 nt, Homo sapiens
  source 1..21: mol_type = genomic RNA
accctcgtcaggtccccgggg

SEQ ID NO: 2347 - RNA, 22 nt, Homo sapiens
  source 1..22: mol_type = genomic RNA
caccggggatggcagagggtcg

SEQ ID NO: 2348 - RNA, 23 nt, Homo sapiens
  source 1..23: mol_type = genomic RNA
tgggctgagggcaggaggcctgt

SEQ ID NO: 2349 - RNA, 23 nt, Homo sapiens
  source 1..23: mol_type = genomic RNA
aatgtggaagtggtctgaggcat

SEQ ID NO: 2350 - RNA, 23 nt, Homo sapiens
  source 1..23: mol_type = genomic RNA
gtgagtgtggatcctggaggaat

SEQ ID NO: 2351 - RNA, 22 nt, Homo sapiens
  source 1..22: mol_type = genomic RNA
tttcttcttagacatggcaacg

SEQ ID NO: 2352 - RNA, 22 nt, Homo sapiens
  source 1..22: mol_type = genomic RNA
ctgccatgtctaagaagaaaac

SEQ ID NO: 2353 - RNA, 22 nt, Homo sapiens
  source 1..22: mol_type = genomic RNA
tttcttcttagacatggcagct

SEQ ID NO: 2354 - RNA, 19 nt, Homo sapiens
  source 1..19: mol_type = genomic RNA
ttgccatgtctaagaagaa

SEQ ID NO: 2355 - RNA, 23 nt, Homo sapiens
  source 1..23: mol_type = genomic RNA
atacacatacacgcaacacacat

SEQ ID NO: 2356 - RNA, 23 nt, Homo sapiens
  source 1..23: mol_type = genomic RNA
tgcagctctggtggaaaatggag

SEQ ID NO: 2357 - RNA, 22 nt, Homo sapiens
  source 1..22: mol_type = genomic RNA
caggatccacagagctagtcca

SEQ ID NO: 2358 - RNA, 22 nt, Homo sapiens
  source 1..22: mol_type = genomic RNA
aactagctctgtggatcctgac

SEQ ID NO: 2359 - RNA, 22 nt, Homo sapiens
  source 1..22: mol_type = genomic RNA
aaagatagacaattggctaaat

SEQ ID NO: 2360 - RNA, 22 nt, Homo sapiens
  source 1..22: mol_type = genomic RNA
ttagccaattgtccatctttag

SEQ ID NO: 2361 - RNA, 22 nt, Homo sapiens
  source 1..22: mol_type = genomic RNA
aaagatggacaattggctaaat

SEQ ID NO: 2362 - RNA, 24 nt, Homo sapiens
  source 1..24: mol_type = genomic RNA
agctgagctccatggacgtgcagt

SEQ ID NO: 2363 - RNA, 22 nt, Homo sapiens
  source 1..22: mol_type = genomic RNA
cttccggtctgtgagccccgtc

SEQ ID NO: 2364 - RNA, 22 nt, Homo sapiens
  source 1..22: mol_type = genomic RNA
tggggtgcccactccgcaagtt

SEQ ID NO: 2365 - RNA, 26 nt, Homo sapiens
  source 1..26: mol_type = genomic RNA
ctcggccgcggcgcgtagcccccgcc

SEQ ID NO: 2366 - RNA, 23 nt, Homo sapiens
  source 1..23: mol_type = genomic RNA
ctgggggacgcgtgagcgcgagc

SEQ ID NO: 2367 - RNA, 21 nt, Homo sapiens
  source 1..21: mol_type = genomic RNA
catacaatctgacatgtattt

SEQ ID NO: 2368 - RNA, 21 nt, Homo sapiens
  source 1..21: mol_type = genomic RNA
atacatgtcagattgtatgcc

SEQ ID NO: 2369 - RNA, 23 nt, Homo sapiens
  source 1..23: mol_type = genomic RNA
ttgcatgtcagattgtaattccc

SEQ ID NO: 2370 - RNA, 21 nt, Homo sapiens
  source 1..21: mol_type = genomic RNA
tccctccttctgtccccacag

SEQ ID NO: 2371 - RNA, 22 nt, Homo sapiens
  source 1..22: mol_type = genomic RNA
actggggagcagaaggagaacc

SEQ ID NO: 2372 - RNA, 23 nt, Homo sapiens
  source 1..23: mol_type = genomic RNA
gaaaatcctttttgtttttccag

SEQ ID NO: 2373 - RNA, 23 nt, Homo sapiens
  source 1..23: mol_type = genomic RNA
agggaaaaaaaaaaggatttgtc

SEQ ID NO: 2374 - RNA, 22 nt, Homo sapiens
  source 1..22: mol_type = genomic RNA
tgtgtccgggaagtggaggagg

SEQ ID NO: 2375 - RNA, 22 nt, Homo sapiens
  source 1..22: mol_type = genomic RNA
tgaagttacatcatggtcgctt

SEQ ID NO: 2376 - RNA, 22 nt, Homo sapiens
  source 1..22: mol_type = genomic RNA
aagcgaccatgatgtaacttca

SEQ ID NO: 2377 - RNA, 21 nt, Homo sapiens
  source 1..21: mol_type = genomic RNA
ttagtgcatagtctttggtct

SEQ ID NO: 2378 - RNA, 22 nt, Homo sapiens
  source 1..22: mol_type = genomic RNA
accgaagactgtgcgctaatct

SEQ ID NO: 2379 - RNA, 21 nt, Homo sapiens
  source 1..21: mol_type = genomic RNA
ttacacagctggacagaggca

SEQ ID NO: 2380 - RNA, 22 nt, Homo sapiens
  source 1..22: mol_type = genomic RNA
tccaggcaggagccggactgga

SEQ ID NO: 2381 - RNA, 21 nt, Homo sapiens
  source 1..21: mol_type = genomic RNA
ctgggctcgggacgcgcggct

SEQ ID NO: 2382 - RNA, 22 nt, Homo sapiens
  source 1..22: mol_type = genomic RNA
ggggctgtgattgaccagcagg

SEQ ID NO: 2383 - RNA, 22 nt, Homo sapiens
  source 1..22: mol_type = genomic RNA
cactgtttcaccactggctctt

SEQ ID NO: 2384 - RNA, 21 nt, Homo sapiens
  source 1..21: mol_type = genomic RNA
gagccagtggtgagacagtga

SEQ ID NO: 2385 - RNA, 22 nt, Homo sapiens
  source 1..22: mol_type = genomic RNA
tctgtgagaccaaagaactact

SEQ ID NO: 2386 - RNA, 22 nt, Homo sapiens
  source 1..22: mol_type = genomic RNA
ttgttctttggtctttcagcca

SEQ ID NO: 2387 - RNA, 22 nt, Homo sapiens
  source 1..22: mol_type = genomic RNA
aaggtattgttcagacttatga

SEQ ID NO: 2388 - RNA, 22 nt, Homo sapiens
  source 1..22: mol_type = genomic RNA
tctgtgatagagattctttgct

SEQ ID NO: 2389 - RNA, 21 nt, Homo sapiens
  source 1..21: mol_type = genomic RNA
tctgaattgtaagagttgtta

SEQ ID NO: 2390 - RNA, 23 nt, Homo sapiens
  source 1..23: mol_type = genomic RNA
agaactcttgcagtcttagatgt

SEQ ID NO: 2391 - RNA, 22 nt, Homo sapiens
  source 1..22: mol_type = genomic RNA
aacgggaatgcaggctgtatct

SEQ ID NO: 2392 - RNA, 23 nt, Homo sapiens
  source 1..23: mol_type = genomic RNA
tctgagttcctggagcctggtct

SEQ ID NO: 2393 - RNA, 23 nt, Homo sapiens
  source 1..23: mol_type = genomic RNA
tggagatccagtgctcgcccgat

SEQ ID NO: 2394 - RNA, 22 nt, Homo sapiens
  source 1..22: mol_type = genomic RNA
tgttgcaagtcggtggagacgt

SEQ ID NO: 2395 - RNA, 22 nt, Homo sapiens
  source 1..22: mol_type = genomic RNA
ctctctactgacttgcaacata

SEQ ID NO: 2396 - RNA, 22 nt, Homo sapiens
  source 1..22: mol_type = genomic RNA
tctcccttcctgccctggctag

SEQ ID NO: 2397 - RNA, 26 nt, Homo sapiens
  source 1..26: mol_type = genomic RNA
cccagggcttggagtggggcaaggtt

SEQ ID NO: 2398 - RNA, 23 nt, Homo sapiens
  source 1..23: mol_type = genomic RNA
tatctgctgggctttctggtgtt

SEQ ID NO: 2399 - RNA, 21 nt, Homo sapiens
  source 1..21: mol_type = genomic RNA
tggctgttggagggggcaggc

SEQ ID NO: 2400 - RNA, 22 nt, Homo sapiens
  source 1..22: mol_type = genomic RNA
cagccctcctcccgcacccaaa

SEQ ID NO: 2401 - RNA, 22 nt, Homo sapiens
  source 1..22: mol_type = genomic RNA
taggggcagcagaggacctggg

SEQ ID NO: 2402 - RNA, 22 nt, Homo sapiens
  source 1..22: mol_type = genomic RNA
ttgaggagacatggtgggggcc

SEQ ID NO: 2403 - RNA, 21 nt, Homo sapiens
  source 1..21: mol_type = genomic RNA
gcagcccagctgaggcctctg

SEQ ID NO: 2404 - RNA, 22 nt, Homo sapiens
  source 1..22: mol_type = genomic RNA
gagcaggcgaggctgggctgaa

SEQ ID NO: 2405 - RNA, 23 nt, Homo sapiens
  source 1..23: mol_type = genomic RNA
ccagccacggactgagagtgcat

SEQ ID NO: 2406 - RNA, 23 nt, Homo sapiens
  source 1..23: mol_type = genomic RNA
gtcctccaggccatgagctgcgg

SEQ ID NO: 2407 - RNA, 22 nt, Homo sapiens
  source 1..22: mol_type = genomic RNA
tcaggcagtgtgggtatcagat

SEQ ID NO: 2408 - RNA, 23 nt, Homo sapiens
  source 1..23: mol_type = genomic RNA
tgagagtggaattcacagtattt

SEQ ID NO: 2409 - RNA, 23 nt, Homo sapiens
  source 1..23: mol_type = genomic RNA
atactgtgaatttcactgtcaca

SEQ ID NO: 2410 - RNA, 21 nt, Homo sapiens
  source 1..21: mol_type = genomic RNA
caaatggacaggataacacct

SEQ ID NO: 2411 - RNA, 22 nt, Homo sapiens
  source 1..22: mol_type = genomic RNA
aggtgttatcctatccatttgc

SEQ ID NO: 2412 - RNA, 22 nt, Homo sapiens
  source 1..22: mol_type = genomic RNA
tgatctcaccgctgcctccttc

SEQ ID NO: 2413 - RNA, 22 nt, Homo sapiens
  source 1..22: mol_type = genomic RNA
caggaggcagtgggcgagcagg

SEQ ID NO: 2414 - RNA, 22 nt, Homo sapiens
  source 1..22: mol_type = genomic RNA
tgcaagacggatactgtcatct

SEQ ID NO: 2415 - RNA, 24 nt, Homo sapiens
  source 1..24: mol_type = genomic RNA
tgtcagtgactcctgccccttggt

SEQ ID NO: 2416 - RNA, 22 nt, Homo sapiens
  source 1..22: mol_type = genomic RNA
agggggcgcagtcactgacgtg

SEQ ID NO: 2417 - RNA, 23 nt, Homo sapiens
  source 1..23: mol_type = genomic RNA
tcaaaatgtagaggaagacccca

SEQ ID NO: 2418 - RNA, 22 nt, Homo sapiens
  source 1..22: mol_type = genomic RNA
aatttactctgcaatcttctcc

SEQ ID NO: 2419 - RNA, 22 nt, Homo sapiens
  source 1..22: mol_type = genomic RNA
agaagattgcagagtaagttcc

SEQ ID NO: 2420 - RNA, 26 nt, Homo sapiens
  source 1..26: mol_type = genomic RNA
cacaggactgactcctcaccccagtg

SEQ ID NO: 2421 - RNA, 22 nt, Homo sapiens
  source 1..22: mol_type = genomic RNA
tctggggatgaggacagtgtgt

SEQ ID NO: 2422 - RNA, 20 nt, Homo sapiens
  source 1..20: mol_type = genomic RNA
atgggtgatgggtgtggtgt

SEQ ID NO: 2423 - RNA, 22 nt, Homo sapiens
  source 1..22: mol_type = genomic RNA
ttggccaccacacctacccctt

SEQ ID NO: 2424 - RNA, 22 nt, Homo sapiens
  source 1..22: mol_type = genomic RNA
tgtagttgtattgtattgccac

SEQ ID NO: 2425 - RNA, 23 nt, Homo sapiens
  source 1..23: mol_type = genomic RNA
tagcaatacagtacaaatatagt

SEQ ID NO: 2426 - RNA, 22 nt, Homo sapiens
  source 1..22: mol_type = genomic RNA
tcagtcacatatctagtgtcta

SEQ ID NO: 2427 - RNA, 22 nt, Homo sapiens
  source 1..22: mol_type = genomic RNA
gacactaggcatgtgagtgatt

SEQ ID NO: 2428 - RNA, 22 nt, Homo sapiens
  source 1..22: mol_type = genomic RNA
tcaatcacttggtaattgctgt

SEQ ID NO: 2429 - RNA, 25 nt, Homo sapiens
  source 1..25: mol_type = genomic RNA
agcggggaggaagtgggcgctgctt

SEQ ID NO: 2430 - RNA, 22 nt, Homo sapiens
  source 1..22: mol_type = genomic RNA
agcccgccccagccgaggttct

SEQ ID NO: 2431 - RNA, 23 nt, Homo sapiens
  source 1..23: mol_type = genomic RNA
gccccggcgcgggcgggttctgg

SEQ ID NO: 2432 - RNA, 22 nt, Homo sapiens
  source 1..22: mol_type = genomic RNA
agcaaggcggcatctctctgat

SEQ ID NO: 2433 - RNA, 21 nt, Homo sapiens
  source 1..21: mol_type = genomic RNA
agagatgccgccttgctcctt

SEQ ID NO: 2434 - RNA, 23 nt, Homo sapiens
  source 1..23: mol_type = genomic RNA
ttgaagaggaggtgctctgtagc

SEQ ID NO: 2435 - RNA, 22 nt, Homo sapiens
  source 1..22: mol_type = genomic RNA
acaacagtgacttgctctccaa

SEQ ID NO: 2436 - RNA, 18 nt, Homo sapiens
  source 1..18: mol_type = genomic RNA
gggtgagggcaggtggtt

SEQ ID NO: 2437 - RNA, 18 nt, Homo sapiens
  source 1..18: mol_type = genomic RNA
cgtgtcttctggcttgat

SEQ ID NO: 2438 - RNA, 23 nt, Homo sapiens
  source 1..23: mol_type = genomic RNA
tgcatcaggccagaagacatgag

SEQ ID NO: 2439 - RNA, 21 nt, Homo sapiens
  source 1..21: mol_type = genomic RNA
aatgagagacctgtactgtat

SEQ ID NO: 2440 - RNA, 22 nt, Homo sapiens
  source 1..22: mol_type = genomic RNA
tccagtacaggtctctcatttc

SEQ ID NO: 2441 - RNA, 22 nt, Homo sapiens
  source 1..22: mol_type = genomic RNA
tgggatccagacagtgggagaa

SEQ ID NO: 2442 - RNA, 22 nt, Homo sapiens
  source 1..22: mol_type = genomic RNA
ttctcccactaccaggctccca

SEQ ID NO: 2443 - RNA, 22 nt, Homo sapiens
  source 1..22: mol_type = genomic RNA
ccaacctaggtggtcagagttg

SEQ ID NO: 2444 - RNA, 22 nt, Homo sapiens
  source 1..22: mol_type = genomic RNA
aactctgaccccttaggttgat

SEQ ID NO: 2445 - RNA, 23 nt, Homo sapiens
  source 1..23: mol_type = genomic RNA
gtgccaccttaactgcagccaat

SEQ ID NO: 2446 - RNA, 22 nt, Homo sapiens
  source 1..22: mol_type = genomic RNA
aagttggctgcagttaaggtgg

SEQ ID NO: 2447 - RNA, 22 nt, Homo sapiens
  source 1..22: mol_type = genomic RNA
aagggggaaggaaacatggaga

SEQ ID NO: 2448 - RNA, 22 nt, Homo sapiens
  source 1..22: mol_type = genomic RNA
tccatgtttccttcccccttct

SEQ ID NO: 2449 - RNA, 21 nt, Homo sapiens
  source 1..21: mol_type = genomic RNA
acacatgggtggctgtggcct

SEQ ID NO: 2450 - RNA, 22 nt, Homo sapiens
  source 1..22: mol_type = genomic RNA
taggccacagccacccatgtgt

SEQ ID NO: 2451 - RNA, 21 nt, Homo sapiens
  source 1..21: mol_type = genomic RNA
agctgtacctgaaaccaagca

SEQ ID NO: 2452 - RNA, 22 nt, Homo sapiens
  source 1..22: mol_type = genomic RNA
tcacaaatctataatatgcagg

SEQ ID NO: 2453 - RNA, 21 nt, Homo sapiens
  source 1..21: mol_type = genomic RNA
tgcttaagttgtaccaagtat

SEQ ID NO: 2454 - RNA, 22 nt, Homo sapiens
  source 1..22: mol_type = genomic RNA
cctggcatatttggtataactt

SEQ ID NO: 2455 - RNA, 22 nt, Homo sapiens
  source 1..22: mol_type = genomic RNA
tgagggctccaggtgacggtgg

SEQ ID NO: 2456 - RNA, 22 nt, Homo sapiens
  source 1..22: mol_type = genomic RNA
acctgccagcacctccctgcag

SEQ ID NO: 2457 - RNA, 23 nt, Homo sapiens
  source 1..23: mol_type = genomic RNA
ggcaggagggctgtgccaggttg

SEQ ID NO: 2458 - RNA, 22 nt, Homo sapiens
  source 1..22: mol_type = genomic RNA
ccctctctggctcctccccaaa

SEQ ID NO: 2459 - RNA, 24 nt, Homo sapiens
  source 1..24: mol_type = genomic RNA
tgggggagccatgagataagagca

SEQ ID NO: 2460 - RNA, 21 nt, Homo sapiens
  source 1..21: mol_type = genomic RNA
gtaccttctggttcagctagt

SEQ ID NO: 2461 - RNA, 23 nt, Homo sapiens
  source 1..23: mol_type = genomic RNA
aactgaaccaggagtgagcttcg

SEQ ID NO: 2462 - RNA, 22 nt, Homo sapiens
  source 1..22: mol_type = genomic RNA
tggggaaggcgtcagtgtcggg

SEQ ID NO: 2463 - RNA, 21 nt, Homo sapiens
  source 1..21: mol_type = genomic RNA
agaccctgcagccttcccacc

SEQ ID NO: 2464 - RNA, 22 nt, Homo sapiens
  source 1..22: mol_type = genomic RNA
acccaggttccctctggccgca

SEQ ID NO: 2465 - RNA, 23 nt, Homo sapiens
  source 1..23: mol_type = genomic RNA
agggccagaggagcctggagtgg

SEQ ID NO: 2466 - RNA, 22 nt, Homo sapiens
  source 1..22: mol_type = genomic RNA
atagtgggaagctggcagattc

SEQ ID NO: 2467 - RNA, 21 nt, Homo sapiens
  source 1..21: mol_type = genomic RNA
atctgccagcttccacagtgg

SEQ ID NO: 2468 - RNA, 25 nt, Homo sapiens
  source 1..25: mol_type = genomic RNA
catgctgacctccctcctgccccag

SEQ ID NO: 2469 - RNA, 23 nt, Homo sapiens
  source 1..23: mol_type = genomic RNA
tgggaggggagaggcagcaagca

SEQ ID NO: 2470 - RNA, 22 nt, Homo sapiens
  source 1..22: mol_type = genomic RNA
tcatttatctgttgggaagcta

SEQ ID NO: 2471 - RNA, 23 nt, Homo sapiens
  source 1..23: mol_type = genomic RNA
ctggcggagcccattccatgcca

SEQ ID NO: 2472 - RNA, 22 nt, Homo sapiens
  source 1..22: mol_type = genomic RNA
cacacaagtggcccccaacact

SEQ ID NO: 2473 - RNA, 22 nt, Homo sapiens
  source 1..22: mol_type = genomic RNA
tgctgggggccacatgagtgtg

SEQ ID NO: 2474 - RNA, 21 nt, Homo sapiens
  source 1..21: mol_type = genomic RNA
gccctgacctgtcctgttctg

SEQ ID NO: 2475 - RNA, 23 nt, Homo sapiens
  source 1..23: mol_type = genomic RNA
tgtagagcagggagcaggaagct

SEQ ID NO: 2476 - RNA, 22 nt, Homo sapiens
  source 1..22: mol_type = genomic RNA
ccaccaggtctagcattgggat

SEQ ID NO: 2477 - RNA, 22 nt, Homo sapiens
  source 1..22: mol_type = genomic RNA
aatcccaatgctagacccggtg

SEQ ID NO: 2478 - RNA, 22 nt, Homo sapiens
  source 1..22: mol_type = genomic RNA
gctgcgggctgcggtcagggcg

SEQ ID NO: 2479 - RNA, 21 nt, Homo sapiens
  source 1..21: mol_type = genomic RNA
aaaggtgctcaaattagacat

SEQ ID NO: 2480 - RNA, 22 nt, Homo sapiens
  source 1..22: mol_type = genomic RNA
cctaatttgaacaccttcggta

SEQ ID NO: 2481 - RNA, 19 nt, Homo sapiens
  source 1..19: mol_type = genomic RNA
aggcaggttatctgggctg

SEQ ID NO: 2482 - RNA, 20 nt, Homo sapiens
  source 1..20: mol_type = genomic RNA
atgcgaggatgctgacagtg

SEQ ID NO: 2483 - RNA, 22 nt, Homo sapiens
  source 1..22: mol_type = genomic RNA
tgaaactggagcgcctggagga

SEQ ID NO: 2484 - RNA, 22 nt, Homo sapiens
  source 1..22: mol_type = genomic RNA
accagcgcgttttcagtttcat

SEQ ID NO: 2485 - RNA, 25 nt, Homo sapiens
  source 1..25: mol_type = genomic RNA
aagggaggaggagcggaggggccct

SEQ ID NO: 2486 - RNA, 22 nt, Homo sapiens
  source 1..22: mol_type = genomic RNA
gcccgagaggatccgtccctgc

SEQ ID NO: 2487 - RNA, 22 nt, Homo sapiens
  source 1..22: mol_type = genomic RNA
aggactgatcctctcgggcagg

SEQ ID NO: 2488 - RNA, 23 nt, Homo sapiens
  source 1..23: mol_type = genomic RNA
cgggctgtccggaggggtcggct

SEQ ID NO: 2489 - RNA, 23 nt, Homo sapiens
  source 1..23: mol_type = genomic RNA
tctgtattctcctttgcctgcag

SEQ ID NO: 2490 - RNA, 23 nt, Homo sapiens
  source 1..23: mol_type = genomic RNA
tcaggcaaagggatatttacaga

SEQ ID NO: 2491 - RNA, 21 nt, Homo sapiens
  source 1..21: mol_type = genomic RNA
tttctgtcttttctggtccag

SEQ ID NO: 2492 - RNA, 23 nt, Homo sapiens
  source 1..23: mol_type = genomic RNA
tggccggatgggacaggaggcat

SEQ ID NO: 2493 - RNA, 23 nt, Homo sapiens
  source 1..23: mol_type = genomic RNA
tctaaagactagacttcgctatg

SEQ ID NO: 2494 - RNA, 23 nt, Homo sapiens
  source 1..23: mol_type = genomic RNA
tggcccggcgacgtctcacggtc

SEQ ID NO: 2495 - RNA, 23 nt, Homo sapiens
  source 1..23: mol_type = genomic RNA
tgagtggggctcccgggacggcg

SEQ ID NO: 2496 - RNA, 21 nt, Homo sapiens
  source 1..21: mol_type = genomic RNA
agcggtgctcctgcgggccga

SEQ ID NO: 2497 - RNA, 23 nt, Homo sapiens
  source 1..23: mol_type = genomic RNA
ccggtcccaggagaacctgcaga

SEQ ID NO: 2498 - RNA, 22 nt, Homo sapiens
  source 1..22: mol_type = genomic RNA
aaggcccgggctttcctcccag

SEQ ID NO: 2499 - RNA, 22 nt, Homo sapiens
  source 1..22: mol_type = genomic RNA
agggaaggaggcttggtcttag

SEQ ID NO: 2500 - RNA, 21 nt, Homo sapiens
  source 1..21: mol_type = genomic RNA
gaggtttggggaggatttgct

SEQ ID NO: 2501 - RNA, 20 nt, Homo sapiens
  source 1..20: mol_type = genomic RNA
cgcccctcctgcccccacag

SEQ ID NO: 2502 - RNA, 22 nt, Homo sapiens
  source 1..22: mol_type = genomic RNA
tgcggggacaggccagggcatc

SEQ ID NO: 2503 - RNA, 22 nt, Homo sapiens
  source 1..22: mol_type = genomic RNA
cctgacccaccccctcccgcag

SEQ ID NO: 2504 - RNA, 22 nt, Homo sapiens
  source 1..22: mol_type = genomic RNA
ctcgggcggaggtggttgagtg

SEQ ID NO: 2505 - RNA, 24 nt, Homo sapiens
  source 1..24: mol_type = genomic RNA
agaggacccgtagctgctagaagg

SEQ ID NO: 2506 - RNA, 22 nt, Homo sapiens
  source 1..22: mol_type = genomic RNA
ttgtggatctcaaggatgtgct

SEQ ID NO: 2507 - RNA, 22 nt, Homo sapiens
  source 1..22: mol_type = genomic RNA
ttctctttctttagccttgtgt

SEQ ID NO: 2508 - RNA, 22 nt, Homo sapiens
  source 1..22: mol_type = genomic RNA
caaggccaaaggaagagaacag

SEQ ID NO: 2509 - RNA, 23 nt, Homo sapiens
  source 1..23: mol_type = genomic RNA
atgcggacctgggttagcggagt

SEQ ID NO: 2510 - RNA, 22 nt, Homo sapiens
  source 1..22: mol_type = genomic RNA
agccaggctctgaagggaaagt

SEQ ID NO: 2511 - RNA, 22 nt, Homo sapiens
  source 1..22: mol_type = genomic RNA
tttcccttcagagcctggcttt

SEQ ID NO: 2512 - RNA, 22 nt, Homo sapiens
  source 1..22: mol_type = genomic RNA
ccagagatggttgccttcctat

SEQ ID NO: 2513 - RNA, 23 nt, Homo sapiens
  source 1..23: mol_type = genomic RNA
cagggaggcgctcactctctgct

SEQ ID NO: 2514 - RNA, 22 nt, Homo sapiens
  source 1..22: mol_type = genomic RNA
catgacgtcacagaggcttcgc

SEQ ID NO: 2515 - RNA, 23 nt, Homo sapiens
  source 1..23: mol_type = genomic RNA
aggcctctgtgacgtcacggtgt

SEQ ID NO: 2516 - RNA, 23 nt, Homo sapiens
  source 1..23: mol_type = genomic RNA
tgccccacctgctgaccaccctc

SEQ ID NO: 2517 - RNA, 23 nt, Homo sapiens
  source 1..23: mol_type = genomic RNA
gtgagtgggagccggtggggctg

SEQ ID NO: 2518 - RNA, 21 nt, Homo sapiens
  source 1..21: mol_type = genomic RNA
taggactagatgttggaatta

SEQ ID NO: 2519 - RNA, 22 nt, Homo sapiens
  source 1..22: mol_type = genomic RNA
aaattcatgttcaatctaaacc

SEQ ID NO: 2520 - RNA, 22 nt, Homo sapiens
  source 1..22: mol_type = genomic RNA
tttagattgaacatgaagttag

SEQ ID NO: 2521 - RNA, 21 nt, Homo sapiens
  source 1..21: mol_type = genomic RNA
gagggcatgcgcactttgtcc

SEQ ID NO: 2522 - RNA, 21 nt, Homo sapiens
  source 1..21: mol_type = genomic RNA
acaaggtgtgcatgcctgacc

SEQ ID NO: 2523 - RNA, 22 nt, Homo sapiens
  source 1..22: mol_type = genomic RNA
cttctgatcaagatttgtggtg

SEQ ID NO: 2524 - RNA, 21 nt, Homo sapiens
  source 1..21: mol_type = genomic RNA
ccaaatcttgatcagaagcct

SEQ ID NO: 2525 - RNA, 24 nt, Homo sapiens
  source 1..24: mol_type = genomic RNA
aggcaggggctggtgctgggcggg

SEQ ID NO: 2526 - RNA, 21 nt, Homo sapiens
  source 1..21: mol_type = genomic RNA
cgcctgcccagccctcctgct

SEQ ID NO: 2527 - RNA, 22 nt, Homo sapiens
  source 1..22: mol_type = genomic RNA
ttaactcctttcacacccatgg

SEQ ID NO: 2528 - RNA, 21 nt, Homo sapiens
  source 1..21: mol_type = genomic RNA
tggatgtggaaggagttatct

SEQ ID NO: 2529 - RNA, 22 nt, Homo sapiens
  source 1..22: mol_type = genomic RNA
tgagtgattgatagctatgttc

SEQ ID NO: 2530 - RNA, 21 nt, Homo sapiens
  source 1..21: mol_type = genomic RNA
atagcaattgctcttttggaa

SEQ ID NO: 2531 - RNA, 21 nt, Homo sapiens
  source 1..21: mol_type = genomic RNA
tctgaaagagcagttggtgtt

SEQ ID NO: 2532 - RNA, 23 nt, Homo sapiens
  source 1..23: mol_type = genomic RNA
cgcgggcgctcctggccgccgcc

SEQ ID NO: 2533 - RNA, 20 nt, Homo sapiens
  source 1..20: mol_type = genomic RNA
ccaggagatccagagagaat

SEQ ID NO: 2534 - RNA, 22 nt, Homo sapiens
  source 1..22: mol_type = genomic RNA
attctctctggatcccatggat

SEQ ID NO: 2535 - RNA, 22 nt, Homo sapiens
  source 1..22: mol_type = genomic RNA
tctgccatcctccctcccctac

SEQ ID NO: 2536 - RNA, 24 nt, Homo sapiens
  source 1..24: mol_type = genomic RNA
ggtgggatggagagaaggtatgag

SEQ ID NO: 2537 - RNA, 18 nt, Homo sapiens
  source 1..18: mol_type = genomic RNA
tgagatgacactgtagct

SEQ ID NO: 2538 - RNA, 21 nt, Homo sapiens
  source 1..21: mol_type = genomic RNA
agcagacttgacctacaatta

SEQ ID NO: 2539 - RNA, 22 nt, Homo sapiens
  source 1..22: mol_type = genomic RNA
cctgcaactttgcctgatcaga

SEQ ID NO: 2540 - RNA, 22 nt, Homo sapiens
  source 1..22: mol_type = genomic RNA
tgatcaggcaaaattgcagact

SEQ ID NO: 2541 - RNA, 22 nt, Homo sapiens
  source 1..22: mol_type = genomic RNA
cagaacaggagcatagaaaggc

SEQ ID NO: 2542 - RNA, 21 nt, Homo sapiens
  source 1..21: mol_type = genomic RNA
attgcctaacatgtgccagaa

SEQ ID NO: 2543 - RNA, 22 nt, Homo sapiens
  source 1..22: mol_type = genomic RNA
tctggtatgtagtaggtaataa

SEQ ID NO: 2544 - RNA, 22 nt, Homo sapiens
  source 1..22: mol_type = genomic RNA
ttaattttttgtttcggtcact

SEQ ID NO: 2545 - RNA, 23 nt, Homo sapiens
  source 1..23: mol_type = genomic RNA
cttgccatcctggtccactgcat

SEQ ID NO: 2546 - RNA, 22 nt, Homo sapiens
  source 1..22: mol_type = genomic RNA
gtggaccaggatggcaagggct

SEQ ID NO: 2547 - RNA, 22 nt, Homo sapiens
  source 1..22: mol_type = genomic RNA
atacctcatctagaatgctgta

SEQ ID NO: 2548 - RNA, 22 nt, Homo sapiens
  source 1..22: mol_type = genomic RNA
ttctagatgagagatatatata

SEQ ID NO: 2549 - RNA, 22 nt, Homo sapiens
  source 1..22: mol_type = genomic RNA
tcttcttcctttgcagagttga

SEQ ID NO: 2550 - RNA, 22 nt, Homo sapiens
  source 1..22: mol_type = genomic RNA
aattctgtaaaggaagaagagg

SEQ ID NO: 2551 - RNA, 22 nt, Homo sapiens
  source 1..22: mol_type = genomic RNA
taggagggaatagtaaaagcag

SEQ ID NO: 2552 - RNA, 22 nt, Homo sapiens
  source 1..22: mol_type = genomic RNA
acccttgagcctgatccctagc

SEQ ID NO: 2553 - RNA, 22 nt, Homo sapiens
  source 1..22: mol_type = genomic RNA
aatgttggaatcctcgctagag

SEQ ID NO: 2554 - RNA, 21 nt, Homo sapiens
  source 1..21: mol_type = genomic RNA
tagcggggattccaatattgg

SEQ ID NO: 2555 - RNA, 22 nt, Homo sapiens
  source 1..22: mol_type = genomic RNA
tgattgtcttcatatctagaac

SEQ ID NO: 2556 - RNA, 22 nt, Homo sapiens
  source 1..22: mol_type = genomic RNA
ttctggatatgaagacaatcaa

SEQ ID NO: 2557 - RNA, 23 nt, Homo sapiens
  source 1..23: mol_type = genomic RNA
ccccggtgttggggcgcgtctgc

SEQ ID NO: 2558 - RNA, 21 nt, Homo sapiens
  source 1..21: mol_type = genomic RNA
ggcgcgcccagctcccgggct

SEQ ID NO: 2559 - RNA, 20 nt, Homo sapiens
  source 1..20: mol_type = genomic RNA
tgaggagatgctgggactga

SEQ ID NO: 2560 - RNA, 21 nt, Homo sapiens
  source 1..21: mol_type = genomic RNA
agagtcggcgacgccgccagc

SEQ ID NO: 2561 - RNA, 22 nt, Homo sapiens
  source 1..22: mol_type = genomic RNA
tgaagccagctctggtctgggc

SEQ ID NO: 2562 - RNA, 22 nt, Homo sapiens
  source 1..22: mol_type = genomic RNA
tgagaccaggactggatgcacc

SEQ ID NO: 2563 - RNA, 24 nt, Homo sapiens
  source 1..24: mol_type = genomic RNA
gatgcgccgcccactgccccgcgc

SEQ ID NO: 2564 - RNA, 22 nt, Homo sapiens
  source 1..22: mol_type = genomic RNA
gcgggggtggcggcggcatccc

SEQ ID NO: 2565 - RNA, 22 nt, Homo sapiens
  source 1..22: mol_type = genomic RNA
ttacggaccagctaagggaggc

SEQ ID NO: 2566 - RNA, 21 nt, Homo sapiens
  source 1..21: mol_type = genomic RNA
cacacatagcaggtgtatata

SEQ ID NO: 2567 - RNA, 22 nt, Homo sapiens
  source 1..22: mol_type = genomic RNA
gtatacacctgatatgtgtatg

SEQ ID NO: 2568 - RNA, 22 nt, Homo sapiens
  source 1..22: mol_type = genomic RNA
tgaatggtaaagcgatgtcaca

SEQ ID NO: 2569 - RNA, 20 nt, Homo sapiens
  source 1..20: mol_type = genomic RNA
atcgctttaccattcatgtt

SEQ ID NO: 2570 - RNA, 18 nt, Homo sapiens
  source 1..18: mol_type = genomic RNA
tggatatgatgactgaaa

SEQ ID NO: 2571 - RNA, 18 nt, Homo sapiens
  source 1..18: mol_type = genomic RNA
cggtgagcgctcgctggc

SEQ ID NO: 2572 - RNA, 23 nt, Homo sapiens
  source 1..23: mol_type = genomic RNA
tctgcactgtgagttggctggct

SEQ ID NO: 2573 - RNA, 24 nt, Homo sapiens
  source 1..24: mol_type = genomic RNA
acatcctgctccacagggcagagg

SEQ ID NO: 2574 - RNA, 22 nt, Homo sapiens
  source 1..22: mol_type = genomic RNA
tctggctatctcacgagactgt

SEQ ID NO: 2575 - RNA, 22 nt, Homo sapiens
  source 1..22: mol_type = genomic RNA
atattattagccacttctggat

SEQ ID NO: 2576 - RNA, 21 nt, Homo sapiens
  source 1..21: mol_type = genomic RNA
agaagtggctaataatattga

SEQ ID NO: 2577 - RNA, 22 nt, Homo sapiens
  source 1..22: mol_type = genomic RNA
taaagtggcagagtatagacac

SEQ ID NO: 2578 - RNA, 22 nt, Homo sapiens
  source 1..22: mol_type = genomic RNA
tgtctatactctgtcactttac

SEQ ID NO: 2579 - RNA, 21 nt, Homo sapiens
  source 1..21: mol_type = genomic RNA
tctcagtaagtggcactctgt

SEQ ID NO: 2580 - RNA, 21 nt, Homo sapiens
  source 1..21: mol_type = genomic RNA
gacagagtgccacttactgaa

SEQ ID NO: 2581 - RNA, 22 nt, Homo sapiens
  source 1..22: mol_type = genomic RNA
aactcacgaagtataccgaagt

SEQ ID NO: 2582 - RNA, 22 nt, Homo sapiens
  source 1..22: mol_type = genomic RNA
ttcggtatactttgtgaattgg

SEQ ID NO: 2583 - RNA, 22 nt, Homo sapiens
  source 1..22: mol_type = genomic RNA
actggcatgctgcatttatata

SEQ ID NO: 2584 - RNA, 22 nt, Homo sapiens
  source 1..22: mol_type = genomic RNA
atctaaatgcagcatgccagtc

SEQ ID NO: 2585 - RNA, 19 nt, Homo sapiens
  source 1..19: mol_type = genomic RNA
catccgtccgtctgtccac

SEQ ID NO: 2586 - RNA, 21 nt, Homo sapiens
  source 1..21: mol_type = genomic RNA
agtggaccgaggaaggaagga

SEQ ID NO: 2587 - RNA, 22 nt, Homo sapiens
  source 1..22: mol_type = genomic RNA
tacacaagaaaaccaaggctca

SEQ ID NO: 2588 - RNA, 23 nt, Homo sapiens
  source 1..23: mol_type = genomic RNA
tacatggatggaaaccttcaagc

SEQ ID NO: 2589 - RNA, 22 nt, Homo sapiens
  source 1..22: mol_type = genomic RNA
tatggaggttctagaccatgtt

SEQ ID NO: 2590 - RNA, 21 nt, Homo sapiens
  source 1..21: mol_type = genomic RNA
taacataatagtgtggattga

SEQ ID NO: 2591 - RNA, 21 nt, Homo sapiens
  source 1..21: mol_type = genomic RNA
tgcttaaccttgccctcgaaa

SEQ ID NO: 2592 - RNA, 21 nt, Homo sapiens
  source 1..21: mol_type = genomic RNA
ttggacggtaaggttaagcaa

SEQ ID NO: 2593 - RNA, 21 nt, Homo sapiens
  source 1..21: mol_type = genomic RNA
tcactcctctcctcccgtctt

SEQ ID NO: 2594 - RNA, 22 nt, Homo sapiens
  source 1..22: mol_type = genomic RNA
aagacgggaggaaagaagggag

SEQ ID NO: 2595 - RNA, 22 nt, Homo sapiens
  source 1..22: mol_type = genomic RNA
tcaggctcagtcccctcccgat

SEQ ID NO: 2596 - RNA, 22 nt, Homo sapiens
  source 1..22: mol_type = genomic RNA
gtcatacacggctctcctctct

SEQ ID NO: 2597 - RNA, 22 nt, Homo sapiens
  source 1..22: mol_type = genomic RNA
agaggctggccgtgatgaattc

SEQ ID NO: 2598 - RNA, 21 nt, Homo sapiens
  source 1..21: mol_type = genomic RNA
cggggcagctcagtacaggat

SEQ ID NO: 2599 - RNA, 22 nt, Homo sapiens
  source 1..22: mol_type = genomic RNA
tcctgtactgagctgccccgag

SEQ ID NO: 2600 - RNA, 22 nt, Homo sapiens
  source 1..22: mol_type = genomic RNA
aatcatacagggacatccagtt

SEQ ID NO: 2601 - RNA, 22 nt, Homo sapiens
  source 1..22: mol_type = genomic RNA
aatcgtacagggtcatccactt

SEQ ID NO: 2602 - RNA, 21 nt, Homo sapiens
  source 1..21: mol_type = genomic RNA
ttgaaaggctatttcttggtc

SEQ ID NO: 2603 - RNA, 21 nt, Homo sapiens
  source 1..21: mol_type = genomic RNA
cccagataatggcactctcaa

SEQ ID NO: 2604 - RNA, 22 nt, Homo sapiens
  source 1..22: mol_type = genomic RNA
gtgacatcacatatacggcagc

SEQ ID NO: 2605 - RNA, 22 nt, Homo sapiens
  source 1..22: mol_type = genomic RNA
caacctggaggactccatgctg

SEQ ID NO: 2606 - RNA, 20 nt, Homo sapiens
  source 1..20: mol_type = genomic RNA
ccatggatctccaggtgggt

SEQ ID NO: 2607 - RNA, 22 nt, Homo sapiens
  source 1..22: mol_type = genomic RNA
cttatgcaagattcccttctac

SEQ ID NO: 2608 - RNA, 22 nt, Homo sapiens
  source 1..22: mol_type = genomic RNA
agtggggaacccttccatgagg

SEQ ID NO: 2609 - RNA, 23 nt, Homo sapiens
  source 1..23: mol_type = genomic RNA
aggacctgcgggacaagattctt

SEQ ID NO: 2610 - RNA, 22 nt, Homo sapiens
  source 1..22: mol_type = genomic RNA
tgaaggtctactgtgtgccagg

SEQ ID NO: 2611 - RNA, 22 nt, Homo sapiens
  source 1..22: mol_type = genomic RNA
ttgtacatggtaggctttcatt

SEQ ID NO: 2612 - RNA, 22 nt, Homo sapiens
  source 1..22: mol_type = genomic RNA
tgaaacatacacgggaaacctc

SEQ ID NO: 2613 - RNA, 22 nt, Homo sapiens
  source 1..22: mol_type = genomic RNA
aaacaaacatggtgcacttctt

SEQ ID NO: 2614 - RNA, 22 nt, Homo sapiens
  source 1..22: mol_type = genomic RNA
gaagttgcccatgttattttcg

SEQ ID NO: 2615 - RNA, 22 nt, Homo sapiens
  source 1..22: mol_type = genomic RNA
tgagtattacatggccaatctc

SEQ ID NO: 2616 - RNA, 22 nt, Homo sapiens
  source 1..22: mol_type = genomic RNA
caaaccacactgtggtgttaga

SEQ ID NO: 2617 - RNA, 21 nt, Homo sapiens
  source 1..21: mol_type = genomic RNA
cagcagcacactgtggtttgt

SEQ ID NO: 2618 - RNA, 23 nt, Homo sapiens
  source 1..23: mol_type = genomic RNA
tttcaagccagggggcgtttttc

SEQ ID NO: 2619 - RNA, 20 nt, Homo sapiens
  source 1..20: mol_type = genomic RNA
tcactacctgacaatacagt

SEQ ID NO: 2620 - RNA, 21 nt, Homo sapiens
  source 1..21: mol_type = genomic RNA
tgctgtattgtcaggtagtga

SEQ ID NO: 2621 - RNA, 22 nt, Homo sapiens
  source 1..22: mol_type = genomic RNA
aacatcacagcaagtctgtgct

SEQ ID NO: 2622 - RNA, 21 nt, Homo sapiens
  source 1..21: mol_type = genomic RNA
ttaagacttgcagtgatgttt

SEQ ID NO: 2623 - RNA, 22 nt, Homo sapiens
  source 1..22: mol_type = genomic RNA
aacatcactgcaagtcttaaca

SEQ ID NO: 2624 - RNA, 21 nt, Homo sapiens
  source 1..21: mol_type = genomic RNA
acagacttgctgtgatgttca

SEQ ID NO: 2625 - RNA, 22 nt, Homo sapiens
  source 1..22: mol_type = genomic RNA
tcaggacacttctgaacttgga

SEQ ID NO: 2626 - RNA, 22 nt, Homo sapiens
  source 1..22: mol_type = genomic RNA
cagttcagaagtgttcctgagt

SEQ ID NO: 2627 - RNA, 22 nt, Homo sapiens
  source 1..22: mol_type = genomic RNA
ttctgcctctgtccaggtcctt

SEQ ID NO: 2628 - RNA, 24 nt, Homo sapiens
  source 1..24: mol_type = genomic RNA
agggctggactcagcggcggagct

SEQ ID NO: 2629 - RNA, 21 nt, Homo sapiens
  source 1..21: mol_type = genomic RNA
tgactgcctcactgaccactt

SEQ ID NO: 2630 - RNA, 24 nt, Homo sapiens
  source 1..24: mol_type = genomic RNA
aatttggtttctgaggcacttagt

SEQ ID NO: 2631 - RNA, 21 nt, Homo sapiens
  source 1..21: mol_type = genomic RNA
tacttttctaggttgttgggg

SEQ ID NO: 2632 - RNA, 23 nt, Homo sapiens
  source 1..23: mol_type = genomic RNA
tcacaacaaccttgcagggtaga

SEQ ID NO: 2633 - RNA, 22 nt, Homo sapiens
  source 1..22: mol_type = genomic RNA
cttggattttcctgggcctcag

SEQ ID NO: 2634 - RNA, 22 nt, Homo sapiens
  source 1..22: mol_type = genomic RNA
tgaggacagggcaaattcacga

SEQ ID NO: 2635 - RNA, 21 nt, Homo sapiens
  source 1..21: mol_type = genomic RNA
tttccctttccatcctggcag

SEQ ID NO: 2636 - RNA, 21 nt, Homo sapiens
  source 1..21: mol_type = genomic RNA
ttgccagggcaggaggtggaa

SEQ ID NO: 2637 - RNA, 22 nt, Homo sapiens
  source 1..22: mol_type = genomic RNA
atcatatgaaccaaactctaat

SEQ ID NO: 2638 - RNA, 22 nt, Homo sapiens
  source 1..22: mol_type = genomic RNA
tagagtctggctgatatggttt

SEQ ID NO: 2639 - RNA, 21 nt, Homo sapiens
  source 1..21: mol_type = genomic RNA
cctgtgctcccagggcctcgc

SEQ ID NO: 2640 - RNA, 22 nt, Homo sapiens
  source 1..22: mol_type = genomic RNA
tgaggcccttggggcacagtgg

SEQ ID NO: 2641 - RNA, 22 nt, Homo sapiens
  source 1..22: mol_type = genomic RNA
tcctaaatctgaaagtccaaaa

SEQ ID NO: 2642 - RNA, 24 nt, Homo sapiens
  source 1..24: mol_type = genomic RNA
ttggactttttcagatttggggat

SEQ ID NO: 2643 - RNA, 22 nt, Homo sapiens
  source 1..22: mol_type = genomic RNA
atgcacctgggcaaggattctg

SEQ ID NO: 2644 - RNA, 23 nt, Homo sapiens
  source 1..23: mol_type = genomic RNA
taatccttgctacctgggtgaga

SEQ ID NO: 2645 - RNA, 18 nt, Homo sapiens
  source 1..18: mol_type = genomic RNA
aatccttgctacctgggt

SEQ ID NO: 2646 - RNA, 22 nt, Homo sapiens
  source 1..22: mol_type = genomic RNA
ttttgtgtctcccattccccag

SEQ ID NO: 2647 - RNA, 22 nt, Homo sapiens
  source 1..22: mol_type = genomic RNA
agggggatggcagagcaaaatt

SEQ ID NO: 2648 - RNA, 22 nt, Homo sapiens
  source 1..22: mol_type = genomic RNA
gtgcatggctgtatatataaca

SEQ ID NO: 2649 - RNA, 21 nt, Homo sapiens
  source 1..21: mol_type = genomic RNA
tatatatacagccatgcactc

SEQ ID NO: 2650 - RNA, 22 nt, Homo sapiens
  source 1..22: mol_type = genomic RNA
aatgcacccgggcaaggattct

SEQ ID NO: 2651 - RNA, 22 nt, Homo sapiens
  source 1..22: mol_type = genomic RNA
aatcctttgtccctgggtgaga

SEQ ID NO: 2652 - RNA, 22 nt, Homo sapiens
  source 1..22: mol_type = genomic RNA
aatgcacctgggcaaggattca

SEQ ID NO: 2653 - RNA, 21 nt, Homo sapiens
  source 1..21: mol_type = genomic RNA
atccttgctatctgggtgcta

SEQ ID NO: 2654 - RNA, 23 nt, Homo sapiens
  source 1..23: mol_type = genomic RNA
ggggtattgtttccgctgccagg

SEQ ID NO: 2655 - RNA, 23 nt, Homo sapiens
  source 1..23: mol_type = genomic RNA
tagcagcgggaacagttctgcag

SEQ ID NO: 2656 - RNA, 22 nt, Homo sapiens
  source 1..22: mol_type = genomic RNA
agaccctggtctgcactctatc

SEQ ID NO: 2657 - RNA, 21 nt, Homo sapiens
  source 1..21: mol_type = genomic RNA
ttgcagctgcggttgtaaggt

SEQ ID NO: 2658 - RNA, 22 nt, Homo sapiens
  source 1..22: mol_type = genomic RNA
cgtcaacacttgctggtttcct

SEQ ID NO: 2659 - RNA, 22 nt, Homo sapiens
  source 1..22: mol_type = genomic RNA
gggagccaggaagtattgatgt

SEQ ID NO: 2660 - RNA, 21 nt, Homo sapiens
  source 1..21: mol_type = genomic RNA
taaggcacccttctgagtaga

SEQ ID NO: 2661 - RNA, 22 nt, Homo sapiens
  source 1..22: mol_type = genomic RNA
tattcaggaaggtgttacttaa

SEQ ID NO: 2662 - RNA, 21 nt, Homo sapiens
  source 1..21: mol_type = genomic RNA
ttttgcaccttttggagtgaa

SEQ ID NO: 2663 - RNA, 23 nt, Homo sapiens
  source 1..23: mol_type = genomic RNA
tgattgtagccttttggagtaga

SEQ ID NO: 2664 - RNA, 23 nt, Homo sapiens
  source 1..23: mol_type = genomic RNA
tactccagagggcgtcactcatg

SEQ ID NO: 2665 - RNA, 23 nt, Homo sapiens
  source 1..23: mol_type = genomic RNA
gggtttgtagctttgctggcatg

SEQ ID NO: 2666 - RNA, 23 nt, Homo sapiens
  source 1..23: mol_type = genomic RNA
cagggctcagggattggatggag

SEQ ID NO: 2667 - RNA, 23 nt, Homo sapiens
  source 1..23: mol_type = genomic RNA
atgctactcggaaatcccactga

SEQ ID NO: 2668 - RNA, 21 nt, Homo sapiens
  source 1..21: mol_type = genomic RNA
gtgggatttctgagtagcatc

SEQ ID NO: 2669 - RNA, 23 nt, Homo sapiens
  source 1..23: mol_type = genomic RNA
ccggggcagattggtgtagggtg

SEQ ID NO: 2670 - RNA, 23 nt, Homo sapiens
  source 1..23: mol_type = genomic RNA
acggagacgacaagactgtgctg

SEQ ID NO: 2671 - RNA, 22 nt, Homo sapiens
  source 1..22: mol_type = genomic RNA
aatccacgctgagcttggcatc

SEQ ID NO: 2672 - RNA, 23 nt, Homo sapiens
  source 1..23: mol_type = genomic RNA
aggaaatgaggctggctaggagc

SEQ ID NO: 2673 - RNA, 22 nt, Homo sapiens
  source 1..22: mol_type = genomic RNA
tactgcagacgtggcaatcatg

SEQ ID NO: 2674 - RNA, 22 nt, Homo sapiens
  source 1..22: mol_type = genomic RNA
tgattggtacgtctgtgggtag

SEQ ID NO: 2675 - RNA, 22 nt, Homo sapiens
  source 1..22: mol_type = genomic RNA
aatcagtgaatgccttgaacct

SEQ ID NO: 2676 - RNA, 21 nt, Homo sapiens
  source 1..21: mol_type = genomic RNA
ttacaggcgtgaaccaccgcg

SEQ ID NO: 2677 - RNA, 21 nt, Homo sapiens
  source 1..21: mol_type = genomic RNA
tactgcagacagtggcaatca

SEQ ID NO: 2678 - RNA, 21 nt, Homo sapiens
  source 1..21: mol_type = genomic RNA
gtttcaccatgttggtcaggc

SEQ ID NO: 2679 - RNA, 22 nt, Homo sapiens
  source 1..22: mol_type = genomic RNA
tactcaggagagtggcaatcac

SEQ ID NO: 2680 - RNA, 22 nt, Homo sapiens
  source 1..22: mol_type = genomic RNA
ttcagatcccagcggtgcctct

SEQ ID NO: 2681 - RNA, 21 nt, Homo sapiens
  source 1..21: mol_type = genomic RNA
gtgtcttttgctctgcagtca

SEQ ID NO: 2682 - RNA, 22 nt, Homo sapiens
  source 1..22: mol_type = genomic RNA
aagtgctgtcatagctgaggtc

SEQ ID NO: 2683 - RNA, 23 nt, Homo sapiens
  source 1..23: mol_type = genomic RNA
cactcagccttgagggcactttc

SEQ ID NO: 2684 - RNA, 23 nt, Homo sapiens
  source 1..23: mol_type = genomic RNA
taaatttcacctttctgagaagg

SEQ ID NO: 2685 - RNA, 18 nt, Homo sapiens
  source 1..18: mol_type = genomic RNA
ttcacagggaggtgtcat

SEQ ID NO: 2686 - RNA, 22 nt, Homo sapiens
  source 1..22: mol_type = genomic RNA
ttcacaaggaggtgtcatttat

SEQ ID NO: 2687 - RNA, 23 nt, Homo sapiens
  source 1..23: mol_type = genomic RNA
taaatttcacctttctgagaaga

SEQ ID NO: 2688 - RNA, 22 nt, Homo sapiens
  source 1..22: mol_type = genomic RNA
ttctcaaggaggtgtcgtttat

SEQ ID NO: 2689 - RNA, 21 nt, Homo sapiens
  source 1..21: mol_type = genomic RNA
attgacacttctgtgagtaga

SEQ ID NO: 2690 - RNA, 23 nt, Homo sapiens
  source 1..23: mol_type = genomic RNA
tactctggagagtgacaatcatg

SEQ ID NO: 2691 - RNA, 21 nt, Homo sapiens
  source 1..21: mol_type = genomic RNA
attgacacctctgtgagtgga

SEQ ID NO: 2692 - RNA, 22 nt, Homo sapiens
  source 1..22: mol_type = genomic RNA
ttctcaagagggaggcaatcat

SEQ ID NO: 2693 - RNA, 22 nt, Homo sapiens
  source 1..22: mol_type = genomic RNA
gagtgccttcttttggagcgtt

SEQ ID NO: 2694 - RNA, 24 nt, Homo sapiens
  source 1..24: mol_type = genomic RNA
ttctccaaaagaaagcactttctg

SEQ ID NO: 2695 - RNA, 18 nt, Homo sapiens
  source 1..18: mol_type = genomic RNA
tgcttcctttcagagggt

SEQ ID NO: 2696 - RNA, 23 nt, Homo sapiens
  source 1..23: mol_type = genomic RNA
ttctcgaggaaagaagcactttc

SEQ ID NO: 2697 - RNA, 18 nt, Homo sapiens
  source 1..18: mol_type = genomic RNA
tgcttcctttcagagggt

SEQ ID NO: 2698 - RNA, 22 nt, Homo sapiens
  source 1..22: mol_type = genomic RNA
atctggaggtaagaagcacttt

SEQ ID NO: 2699 - RNA, 22 nt, Homo sapiens
  source 1..22: mol_type = genomic RNA
cctctagatggaagcactgtct

SEQ ID NO: 2700 - RNA, 22 nt, Homo sapiens
  source 1..22: mol_type = genomic RNA
atcgtgcatccctttagagtgt

SEQ ID NO: 2701 - RNA, 22 nt, Homo sapiens
  source 1..22: mol_type = genomic RNA
atcgtgcatccctttagagtgt

SEQ ID NO: 2702 - RNA, 22 nt, Homo sapiens
  source 1..22: mol_type = genomic RNA
atcgtgcatccttttagagtgt

SEQ ID NO: 2703 - RNA, 21 nt, Homo sapiens
  source 1..21: mol_type = genomic RNA
agagattggtagaaatcaggt

SEQ ID NO: 2704 - RNA, 21 nt, Homo sapiens
  source 1..21: mol_type = genomic RNA
actgaatcctcttttcctcag

SEQ ID NO: 2705 - RNA, 22 nt, Homo sapiens
  source 1..22: mol_type = genomic RNA
tgggatgagggattgaagtgga

SEQ ID NO: 2706 - RNA, 23 nt, Homo sapiens
  source 1..23: mol_type = genomic RNA
aatcggacccatttaaaccggag

SEQ ID NO: 2707 - RNA, 24 nt, Homo sapiens
  source 1..24: mol_type = genomic RNA
tctgggcacaggcggatggacagg

SEQ ID NO: 2708 - RNA, 22 nt, Homo sapiens
  source 1..22: mol_type = genomic RNA
gaaagcgcttccctttgctgga

SEQ ID NO: 2709 - RNA, 20 nt, Homo sapiens
  source 1..20: mol_type = genomic RNA
ctgcaaagggaagccctttc

SEQ ID NO: 2710 - RNA, 22 nt, Homo sapiens
  source 1..22: mol_type = genomic RNA
caaagcgctcccctttagaggt

SEQ ID NO: 2711 - RNA, 23 nt, Homo sapiens
  source 1..23: mol_type = genomic RNA
caaagcgcttctctttagagtgt

SEQ ID NO: 2712 - RNA, 23 nt, Homo sapiens
  source 1..23: mol_type = genomic RNA
tctctggagggaagcactttctg

SEQ ID NO: 2713 - RNA, 21 nt, Homo sapiens
  source 1..21: mol_type = genomic RNA
caaagcgcttccctttggagc

SEQ ID NO: 2714 - RNA, 22 nt, Homo sapiens
  source 1..22: mol_type = genomic RNA
ctctagagggaagcactttctg

SEQ ID NO: 2715 - RNA, 21 nt, Homo sapiens
  source 1..21: mol_type = genomic RNA
aaagcgcttcccttcagagtg

SEQ ID NO: 2716 - RNA, 22 nt, Homo sapiens
  source 1..22: mol_type = genomic RNA
ctctagagggaagcgctttctg

SEQ ID NO: 2717 - RNA, 21 nt, Homo sapiens
  source 1..21: mol_type = genomic RNA
gaaagcgcttctctttagagg

SEQ ID NO: 2718 - RNA, 22 nt, Homo sapiens
  source 1..22: mol_type = genomic RNA
ctctagagggaagcactttctc

SEQ ID NO: 2719 - RNA, 21 nt, Homo sapiens
  source 1..21: mol_type = genomic RNA
ccagtgactgagctggagcca

SEQ ID NO: 2720 - RNA, 22 nt, Homo sapiens
  source 1..22: mol_type = genomic RNA
aggataggaagaatgaagtgct

SEQ ID NO: 2721 - RNA, 22 nt, Homo sapiens
  source 1..22: mol_type = genomic RNA
aggagagtggattccaggtggt

SEQ ID NO: 2722 - RNA, 22 nt, Homo sapiens
  source 1..22: mol_type = genomic RNA
tcctcctctacctcatcccagt

SEQ ID NO: 2723 - RNA, 22 nt, Homo sapiens
  source 1..22: mol_type = genomic RNA
tgaggggtttggaatgggatgg

SEQ ID NO: 2724 - RNA, 21 nt, Homo sapiens
  source 1..21: mol_type = genomic RNA
atccagttctctgagggggct

SEQ ID NO: 2725 - RNA, 22 nt, Homo sapiens
  source 1..22: mol_type = genomic RNA
aacccctaaggcaactggatgg

SEQ ID NO: 2726 - RNA, 21 nt, Homo sapiens
  source 1..21: mol_type = genomic RNA
tcatcctcgtctccctcccag

SEQ ID NO: 2727 - RNA, 22 nt, Homo sapiens
  source 1..22: mol_type = genomic RNA
agggaaggggacgagggttggg

SEQ ID NO: 2728 - RNA, 23 nt, Homo sapiens
  source 1..23: mol_type = genomic RNA
aagaagagactgagtcatcgaat

SEQ ID NO: 2729 - RNA, 23 nt, Homo sapiens
  source 1..23: mol_type = genomic RNA
caatggcacaaactcattcttga

SEQ ID NO: 2730 - RNA, 22 nt, Homo sapiens
  source 1..22: mol_type = genomic RNA
aaagtgcatccttttagagtgt

SEQ ID NO: 2731 - RNA, 22 nt, Homo sapiens
  source 1..22: mol_type = genomic RNA
ctctagagggaagcgctttctg

SEQ ID NO: 2732 - RNA, 22 nt, Homo sapiens
  source 1..22: mol_type = genomic RNA
aaagtgcatccttttagaggtt

SEQ ID NO: 2733 - RNA, 22 nt, Homo sapiens
  source 1..22: mol_type = genomic RNA
ctctagagggaagcgctttctg

SEQ ID NO: 2734 - RNA, 22 nt, Homo sapiens
  source 1..22: mol_type = genomic RNA
aaagtgcatctttttagaggat

SEQ ID NO: 2735 - RNA, 22 nt, Homo sapiens
  source 1..22: mol_type = genomic RNA
ctctagagggaagcgctttctg

SEQ ID NO: 2736 - RNA, 22 nt, Homo sapiens
  source 1..22: mol_type = genomic RNA
caaagtgcctccctttagagtg

SEQ ID NO: 2737 - RNA, 22 nt, Homo sapiens
  source 1..22: mol_type = genomic RNA
aagtgcctccttttagagtgtt

SEQ ID NO: 2738 - RNA, 22 nt, Homo sapiens
  source 1..22: mol_type = genomic RNA
ttctccaaaagggagcactttc

SEQ ID NO: 2739 - RNA, 22 nt, Homo sapiens
  source 1..22: mol_type = genomic RNA
aaagtgcttccctttggactgt

SEQ ID NO: 2740 - RNA, 21 nt, Homo sapiens
  source 1..21: mol_type = genomic RNA
ctccagagggaagtactttct

SEQ ID NO: 2741 - RNA, 21 nt, Homo sapiens
  source 1..21: mol_type = genomic RNA
aaagtgcttccttttagaggg

SEQ ID NO: 2742 - RNA, 22 nt, Homo sapiens
  source 1..22: mol_type = genomic RNA
aaagtgcttccttttagagggt

SEQ ID NO: 2743 - RNA, 22 nt, Homo sapiens
  source 1..22: mol_type = genomic RNA
ctctagagggaagcactttctg

SEQ ID NO: 2744 - RNA, 22 nt, Homo sapiens
  source 1..22: mol_type = genomic RNA
aaagtgcttctctttggtgggt

SEQ ID NO: 2745 - RNA, 20 nt, Homo sapiens
  source 1..20: mol_type = genomic RNA
ctacaaagggaagccctttc

SEQ ID NO: 2746 - RNA, 21 nt, Homo sapiens
  source 1..21: mol_type = genomic RNA
aaagtgcttcctttttgaggg

SEQ ID NO: 2747 - RNA, 22 nt, Homo sapiens
  source 1..22: mol_type = genomic RNA
aagtgcttccttttagagggtt

SEQ ID NO: 2748 - RNA, 24 nt, Homo sapiens
  source 1..24: mol_type = genomic RNA
acaaagtgcttccctttagagtgt

SEQ ID NO: 2749 - RNA, 22 nt, Homo sapiens
  source 1..22: mol_type = genomic RNA
acaaagtgcttccctttagagt

SEQ ID NO: 2750 - RNA, 22 nt, Homo sapiens
  source 1..22: mol_type = genomic RNA
aacgcacttccctttagagtgt

SEQ ID NO: 2751 - RNA, 22 nt, Homo sapiens
  source 1..22: mol_type = genomic RNA
aaaatggttccctttagagtgt

SEQ ID NO: 2752 - RNA, 22 nt, Homo sapiens
  source 1..22: mol_type = genomic RNA
ctctagagggaagcgctttctg

SEQ ID NO: 2753 - RNA, 23 nt, Homo sapiens
  source 1..23: mol_type = genomic RNA
gaacgcgcttccctatagagggt

SEQ ID NO: 2754 - RNA, 22 nt, Homo sapiens
  source 1..22: mol_type = genomic RNA
ctctagagggaagcgctttctg

SEQ ID NO: 2755 - RNA, 21 nt, Homo sapiens
  source 1..21: mol_type = genomic RNA
gaaggcgcttccctttggagt

SEQ ID NO: 2756 - RNA, 22 nt, Homo sapiens
  source 1..22: mol_type = genomic RNA
ctacaaagggaagcactttctc

SEQ ID NO: 2757 - RNA, 22 nt, Homo sapiens
  source 1..22: mol_type = genomic RNA
gaaggcgcttccctttagagcg

SEQ ID NO: 2758 - RNA, 21 nt, Homo sapiens
  source 1..21: mol_type = genomic RNA
ctccagagggatgcactttct

SEQ ID NO: 2759 - RNA, 22 nt, Homo sapiens
  source 1..22: mol_type = genomic RNA
ctctagagggaagcactttctg

SEQ ID NO: 2760 - RNA, 22 nt, Homo sapiens
  source 1..22: mol_type = genomic RNA
gaaagtgcttccttttagaggc

SEQ ID NO: 2761 - RNA, 23 nt, Homo sapiens
  source 1..23: mol_type = genomic RNA
ctcttgagggaagcactttctgt

SEQ ID NO: 2762 - RNA, 20 nt, Homo sapiens
  source 1..20: mol_type = genomic RNA
ctgcaaagggaagccctttc

SEQ ID NO: 2763 - RNA, 22 nt, Homo sapiens
  source 1..22: mol_type = genomic RNA
cctcccacacccaaggcttgca

SEQ ID NO: 2764 - RNA, 22 nt, Homo sapiens
  source 1..22: mol_type = genomic RNA
catgccttgagtgtaggaccgt

SEQ ID NO: 2765 - RNA, 22 nt, Homo sapiens
  source 1..22: mol_type = genomic RNA
atcatacaaggacaatttcttt

SEQ ID NO: 2766 - RNA, 22 nt, Homo sapiens
  source 1..22: mol_type = genomic RNA
ggagaaattatccttggtgtgt

SEQ ID NO: 2767 - RNA, 22 nt, Homo sapiens
  source 1..22: mol_type = genomic RNA
tggtgggcacagaatctggact

SEQ ID NO: 2768 - RNA, 25 nt, Homo sapiens
  source 1..25: mol_type = genomic RNA
aaaggattctgctgtcggtcccact

SEQ ID NO: 2769 - RNA, 22 nt, Homo sapiens
  source 1..22: mol_type = genomic RNA
tgtgacagattgataactgaaa

SEQ ID NO: 2770 - RNA, 23 nt, Homo sapiens
  source 1..23: mol_type = genomic RNA
tcggggatcatcatgtcacgaga

SEQ ID NO: 2771 - RNA, 22 nt, Homo sapiens
  source 1..22: mol_type = genomic RNA
aaacattcgcggtgcacttctt

SEQ ID NO: 2772 - RNA, 22 nt, Homo sapiens
  source 1..22: mol_type = genomic RNA
attctgcatttttagcaagttc

SEQ ID NO: 2773 - RNA, 22 nt, Homo sapiens
  source 1..22: mol_type = genomic RNA
acctgaggttgtgcatttctaa

SEQ ID NO: 2774 - RNA, 22 nt, Homo sapiens
  source 1..22: mol_type = genomic RNA
tcagcaaacatttattgtgtgc

SEQ ID NO: 2775 - RNA, 22 nt, Homo sapiens
  source 1..22: mol_type = genomic RNA
tcagtaaatgtttattagatga

SEQ ID NO: 2776 - RNA, 22 nt, Homo sapiens
  source 1..22: mol_type = genomic RNA
agctacagttacttttgcacca

SEQ ID NO: 2777 - RNA, 20 nt, Homo sapiens
  source 1..20: mol_type = genomic RNA
taaaaactgcaattactttc

SEQ ID NO: 2778 - RNA, 23 nt, Homo sapiens
  source 1..23: mol_type = genomic RNA
tgcaaaagtaattgcagtttttg

SEQ ID NO: 2779 - RNA, 22 nt, Homo sapiens
  source 1..22: mol_type = genomic RNA
agaagtaattgcggttttgcca

SEQ ID NO: 2780 - RNA, 22 nt, Homo sapiens
  source 1..22: mol_type = genomic RNA
caaaactggcaattacttttgc

SEQ ID NO: 2781 - RNA, 22 nt, Homo sapiens
  source 1..22: mol_type = genomic RNA
aaaagtaattgcgagttttacc

SEQ ID NO: 2782 - RNA, 25 nt, Homo sapiens
  source 1..25: mol_type = genomic RNA
aaaaaccacaattacttttgcacca

SEQ ID NO: 2783 - RNA, 22 nt, Homo sapiens
  source 1..22: mol_type = genomic RNA
aaaagtaattgtggattttgct

SEQ ID NO: 2784 - RNA, 22 nt, Homo sapiens
  source 1..22: mol_type = genomic RNA
caaaaaccggcaattacttttg

SEQ ID NO: 2785 - RNA, 22 nt, Homo sapiens
  source 1..22: mol_type = genomic RNA
gaaaacgacaatgacttttgca

SEQ ID NO: 2786 - RNA, 21 nt, Homo sapiens
  source 1..21: mol_type = genomic RNA
caaaaactgcaattactttca

SEQ ID NO: 2787 - RNA, 21 nt, Homo sapiens
  source 1..21: mol_type = genomic RNA
aaaggtaattgtggtttctgc

SEQ ID NO: 2788 - RNA, 22 nt, Homo sapiens
  source 1..22: mol_type = genomic RNA
caaaaactgcagttacttttgc

SEQ ID NO: 2789 - RNA, 20 nt, Homo sapiens
  source 1..20: mol_type = genomic RNA
aaaagtgattgcagtgtttg

SEQ ID NO: 2790 - RNA, 22 nt, Homo sapiens
  source 1..22: mol_type = genomic RNA
aaaggtaattgcagtttttccc

SEQ ID NO: 2791 - RNA, 21 nt, Homo sapiens
  source 1..21: mol_type = genomic RNA
taaaaactgcaattactttta

SEQ ID NO: 2792 - RNA, 23 nt, Homo sapiens
  source 1..23: mol_type = genomic RNA
tgcaaaagtaattgcagtttttg

SEQ ID NO: 2793 - RNA, 21 nt, Homo sapiens
  source 1..21: mol_type = genomic RNA
aaaagtaactgcggtttttga

SEQ ID NO: 2794 - RNA, 22 nt, Homo sapiens
  source 1..22: mol_type = genomic RNA
aacggcaatgacttttgtacca

SEQ ID NO: 2795 - RNA, 22 nt, Homo sapiens
  source 1..22: mol_type = genomic RNA
caaaaactgcagttacttttgt

SEQ ID NO: 2796 - RNA, 22 nt, Homo sapiens
  source 1..22: mol_type = genomic RNA
aaaagtaattgcggtttttgcc

SEQ ID NO: 2797 - RNA, 20 nt, Homo sapiens
  source 1..20: mol_type = genomic RNA
aaaaggcattgtggtttttg

SEQ ID NO: 2798 - RNA, 22 nt, Homo sapiens
  source 1..22: mol_type = genomic RNA
aaagaccgtgactacttttgca

SEQ ID NO: 2799 - RNA, 22 nt, Homo sapiens
  source 1..22: mol_type = genomic RNA
agaagtaactacggtttttgca

SEQ ID NO: 2800 - RNA, 19 nt, Homo sapiens
  source 1..19: mol_type = genomic RNA
aaaaaccacaattactttt

SEQ ID NO: 2801 - RNA, 19 nt, Homo sapiens
  source 1..19: mol_type = genomic RNA
aaaagtaattgcggtcttt

SEQ ID NO: 2802 - RNA, 22 nt, Homo sapiens
  source 1..22: mol_type = genomic RNA
caaaaactgcaattacttttgc

SEQ ID NO: 2803 - RNA, 22 nt, Homo sapiens
  source 1..22: mol_type = genomic RNA
gaaagtaattgctgtttttgcc

SEQ ID NO: 2804 - RNA, 21 nt, Homo sapiens
  source 1..21: mol_type = genomic RNA
taaaactgcagttatttttgc

SEQ ID NO: 2805 - RNA, 21 nt, Homo sapiens
  source 1..21: mol_type = genomic RNA
aaaagtaattgcagtttttgc

SEQ ID NO: 2806 - RNA, 22 nt, Homo sapiens
  source 1..22: mol_type = genomic RNA
taaaacccacaattatgtttgt

SEQ ID NO: 2807 - RNA, 22 nt, Homo sapiens
  source 1..22: mol_type = genomic RNA
aaaagtaattgcgggttttgcc

SEQ ID NO: 2808 - RNA, 21 nt, Homo sapiens
  source 1..21: mol_type = genomic RNA
caaaaccgcagtaacttttgt

SEQ ID NO: 2809 - RNA, 22 nt, Homo sapiens
  source 1..22: mol_type = genomic RNA
aaaagttattgcggttttggct

SEQ ID NO: 2810 - RNA, 21 nt, Homo sapiens
  source 1..21: mol_type = genomic RNA
tggcagttacttttgcaccag

SEQ ID NO: 2811 - RNA, 21 nt, Homo sapiens
  source 1..21: mol_type = genomic RNA
aaaagtaattgcggtttttgc

SEQ ID NO: 2812 - RNA, 20 nt, Homo sapiens
  source 1..20: mol_type = genomic RNA
aaaactgcagttacttttgc

SEQ ID NO: 2813 - RNA, 18 nt, Homo sapiens
  source 1..18: mol_type = genomic RNA
aaaagtacttgcggattt

SEQ ID NO: 2814 - RNA, 20 nt, Homo sapiens
  source 1..20: mol_type = genomic RNA
gtgcaaaagtcatcacggtt

SEQ ID NO: 2815 - RNA, 22 nt, Homo sapiens
  source 1..22: mol_type = genomic RNA
caaaaccgcgattactcttgca

SEQ ID NO: 2816 - RNA, 21 nt, Homo sapiens
  source 1..21: mol_type = genomic RNA
aaaagtaattgtggtttttgc

SEQ ID NO: 2817 - RNA, 21 nt, Homo sapiens
  source 1..21: mol_type = genomic RNA
aaaaactgcaatcacttttgc

SEQ ID NO: 2818 - RNA, 22 nt, Homo sapiens
  source 1..22: mol_type = genomic RNA
caaaagtgattgtggtttttgc

SEQ ID NO: 2819 - RNA, 22 nt, Homo sapiens
  source 1..22: mol_type = genomic RNA
caagaacctcagttgcttttgt

SEQ ID NO: 2820 - RNA, 22 nt, Homo sapiens
  source 1..22: mol_type = genomic RNA
aaaagtaattgtggttttggcc

SEQ ID NO: 2821 - RNA, 22 nt, Homo sapiens
  source 1..22: mol_type = genomic RNA
caaaaatctcaattacttttgc

SEQ ID NO: 2822 - RNA, 22 nt, Homo sapiens
  source 1..22: mol_type = genomic RNA
aaaagtaattgcggtttttgcc

SEQ ID NO: 2823 - RNA, 22 nt, Homo sapiens
  source 1..22: mol_type = genomic RNA
caaaaaccacagtttcttttgc

SEQ ID NO: 2824 - RNA, 22 nt, Homo sapiens
  source 1..22: mol_type = genomic RNA
aaaagtaattgtggtttttgcc

SEQ ID NO: 2825 - RNA, 22 nt, Homo sapiens
  source 1..22: mol_type = genomic RNA
aaaaactgagactacttttgca

SEQ ID NO: 2826 - RNA, 19 nt, Homo sapiens
  source 1..19: mol_type = genomic RNA
aaaaactgtaattactttt

SEQ ID NO: 2827 - RNA, 22 nt, Homo sapiens
  source 1..22: mol_type = genomic RNA
aaaactgtaattacttttgtac

SEQ ID NO: 2828 - RNA, 23 nt, Homo sapiens
  source 1..23: mol_type = genomic RNA
tgcaaaagtaattgcagtttttg

SEQ ID NO: 2829 - RNA, 23 nt, Homo sapiens
  source 1..23: mol_type = genomic RNA
caaaaaccgcaattacttttgca

SEQ ID NO: 2830 - RNA, 22 nt, Homo sapiens
  source 1..22: mol_type = genomic RNA
aaaagtaatcgcggtttttgtc

SEQ ID NO: 2831 - RNA, 22 nt, Homo sapiens
  source 1..22: mol_type = genomic RNA
aaaagtaattgcggattttgcc

SEQ ID NO: 2832 - RNA, 22 nt, Homo sapiens
  source 1..22: mol_type = genomic RNA
aaaagtaattgcggtctttggt

SEQ ID NO: 2833 - RNA, 22 nt, Homo sapiens
  source 1..22: mol_type = genomic RNA
aaaagtacttgcggattttgct

SEQ ID NO: 2834 - RNA, 22 nt, Homo sapiens
  source 1..22: mol_type = genomic RNA
aaaagtatttgcgggttttgtc

SEQ ID NO: 2835 - RNA, 21 nt, Homo sapiens
  source 1..21: mol_type = genomic RNA
caaaggtatttgtggtttttg

SEQ ID NO: 2836 - RNA, 22 nt, Homo sapiens
  source 1..22: mol_type = genomic RNA
caaaagtaattgtggattttgt

SEQ ID NO: 2837 - RNA, 22 nt, Homo sapiens
  source 1..22: mol_type = genomic RNA
ccaaaactgcagttacttttgc

SEQ ID NO: 2838 - RNA, 22 nt, Homo sapiens
  source 1..22: mol_type = genomic RNA
aaaagtaattgcggtttttgcc

SEQ ID NO: 2839 - RNA, 22 nt, Homo sapiens
  source 1..22: mol_type = genomic RNA
tagcaaaaactgcagttacttt

SEQ ID NO: 2840 - RNA, 22 nt, Homo sapiens
  source 1..22: mol_type = genomic RNA
gctggtgcaaaagtaatggcgg

SEQ ID NO: 2841 - RNA, 23 nt, Homo sapiens
  source 1..23: mol_type = genomic RNA
atggccaaaactgcagttatttt

SEQ ID NO: 2842 - RNA, 25 nt, Homo sapiens
  source 1..25: mol_type = genomic RNA
aaaaaccacaattacttttgcacca

SEQ ID NO: 2843 - RNA, 21 nt, Homo sapiens
  source 1..21: mol_type = genomic RNA
caaaagtgatcgtggtttttg

SEQ ID NO: 2844 - RNA, 23 nt, Homo sapiens
  source 1..23: mol_type = genomic RNA
caaagactgcaattacttttgcg

SEQ ID NO: 2845 - RNA, 23 nt, Homo sapiens
  source 1..23: mol_type = genomic RNA
aaaagtaactgcggtttttgcct

SEQ ID NO: 2846 - RNA, 22 nt, Homo sapiens
  source 1..22: mol_type = genomic RNA
aaaagtaatcactgtttttgcc

SEQ ID NO: 2847 - RNA, 23 nt, Homo sapiens
  source 1..23: mol_type = genomic RNA
caaaaaccgcaattacttttgca

SEQ ID NO: 2848 - RNA, 21 nt, Homo sapiens
  source 1..21: mol_type = genomic RNA
tgacaactatggatgagctct

SEQ ID NO: 2849 - RNA, 20 nt, Homo sapiens
  source 1..20: mol_type = genomic RNA
agtgcctgagggagtaagag

SEQ ID NO: 2850 - RNA, 22 nt, Homo sapiens
  source 1..22: mol_type = genomic RNA
tgtcttactccctcaggcacat

SEQ ID NO: 2851 - RNA, 23 nt, Homo sapiens
  source 1..23: mol_type = genomic RNA
agtgcctgagggagtaagagccc

SEQ ID NO: 2852 - RNA, 22 nt, Homo sapiens
  source 1..22: mol_type = genomic RNA
atgtgcctgagggagtaagaca

SEQ ID NO: 2853 - RNA, 20 nt, Homo sapiens
  source 1..20: mol_type = genomic RNA
tcttactccctcaggcactg

SEQ ID NO: 2854 - RNA, 21 nt, Homo sapiens
  source 1..21: mol_type = genomic RNA
gcgacccactcttggtttcca

SEQ ID NO: 2855 - RNA, 21 nt, Homo sapiens
  source 1..21: mol_type = genomic RNA
gcgacccatacttggtttcag

SEQ ID NO: 2856 - RNA, 22 nt, Homo sapiens
  source 1..22: mol_type = genomic RNA
gaaatcaagcgtgggtgagacc

SEQ ID NO: 2857 - RNA, 21 nt, Homo sapiens
  source 1..21: mol_type = genomic RNA
aacaggtgactggttagacaa

SEQ ID NO: 2858 - RNA, 21 nt, Homo sapiens
  source 1..21: mol_type = genomic RNA
aaaacggtgagattttgtttt

SEQ ID NO: 2859 - RNA, 21 nt, Homo sapiens
  source 1..21: mol_type = genomic RNA
gctagtcctgactcagccagt

SEQ ID NO: 2860 - RNA, 21 nt, Homo sapiens
  source 1..21: mol_type = genomic RNA
agggtaagctgaacctctgat

SEQ ID NO: 2861 - RNA, 22 nt, Homo sapiens
  source 1..22: mol_type = genomic RNA
atattaccattagctcatcttt

SEQ ID NO: 2862 - RNA, 22 nt, Homo sapiens
  source 1..22: mol_type = genomic RNA
gatgagctcattgtaatatgag

SEQ ID NO: 2863 - RNA, 23 nt, Homo sapiens
  source 1..23: mol_type = genomic RNA
gtttgcacgggtgggccttgtct

SEQ ID NO: 2864 - RNA, 19 nt, Homo sapiens
  source 1..19: mol_type = genomic RNA
gtcctaggaggctcctctg

SEQ ID NO: 2865 - RNA, 21 nt, Homo sapiens
  source 1..21: mol_type = genomic RNA
caattctcaaaggagcctccc

SEQ ID NO: 2866 - RNA, 21 nt, Homo sapiens
  source 1..21: mol_type = genomic RNA
gttggggtgcaggggtctgct

SEQ ID NO: 2867 - RNA, 22 nt, Homo sapiens
  source 1..22: mol_type = genomic RNA
ttagcttaaggagtaccagatc

SEQ ID NO: 2868 - RNA, 21 nt, Homo sapiens
  source 1..21: mol_type = genomic RNA
tatggtactccttaagctaac

SEQ ID NO: 2869 - RNA, 19 nt, Homo sapiens
  source 1..19: mol_type = genomic RNA
tgagctgctgtaccaaaat

SEQ ID NO: 2870 - RNA, 22 nt, Homo sapiens
  source 1..22: mol_type = genomic RNA
cacatatgaagtgagccagcac

SEQ ID NO: 2871 - RNA, 22 nt, Homo sapiens
  source 1..22: mol_type = genomic RNA
tgctggctcatttcatatgtgt

SEQ ID NO: 2872 - RNA, 22 nt, Homo sapiens
  source 1..22: mol_type = genomic RNA
ttccatgcctcctagaagttcc

SEQ ID NO: 2873 - RNA, 22 nt, Homo sapiens
  source 1..22: mol_type = genomic RNA
agccttccaggagaaatggaga

SEQ ID NO: 2874 - RNA, 22 nt, Homo sapiens
  source 1..22: mol_type = genomic RNA
taaaactttaagtgtgcctagg

SEQ ID NO: 2875 - RNA, 22 nt, Homo sapiens
  source 1..22: mol_type = genomic RNA
taggcacacttaaagttatagc

SEQ ID NO: 2876 - RNA, 22 nt, Homo sapiens
  source 1..22: mol_type = genomic RNA
gaatatgggtatattagtttgg

SEQ ID NO: 2877 - RNA, 22 nt, Homo sapiens
  source 1..22: mol_type = genomic RNA
aaactaatatacccatattctg

SEQ ID NO: 2878 - RNA, 22 nt, Homo sapiens
  source 1..22: mol_type = genomic RNA
tagttcttccctttgcccaatt

SEQ ID NO: 2879 - RNA, 22 nt, Homo sapiens
  source 1..22: mol_type = genomic RNA
cagggaaatgggaagaactaga

SEQ ID NO: 2880 - RNA, 22 nt, Homo sapiens
  source 1..22: mol_type = genomic RNA
ctgaatagctgggactacaggt

SEQ ID NO: 2881 - RNA, 22 nt, Homo sapiens
  source 1..22: mol_type = genomic RNA
tgaagtaccagctactcgagag

SEQ ID NO: 2882 - RNA, 22 nt, Homo sapiens
  source 1..22: mol_type = genomic RNA
cagagtgacaagctggttaaag

SEQ ID NO: 2883 - RNA, 22 nt, Homo sapiens
  source 1..22: mol_type = genomic RNA
tatccagcttgttactatatgc

SEQ ID NO: 2884 - RNA, 21 nt, Homo sapiens
  source 1..21: mol_type = genomic RNA
gccccgggcagtgtgatcatc

SEQ ID NO: 2885 - RNA, 18 nt, Homo sapiens
  source 1..18: mol_type = genomic RNA
atggtcacctccgggact

SEQ ID NO: 2886 - RNA, 19 nt, Homo sapiens
  source 1..19: mol_type = genomic RNA
aagtcccactaatgccagc

SEQ ID NO: 2887 - RNA, 21 nt, Homo sapiens
  source 1..21: mol_type = genomic RNA
actggcattagtgggactttt

SEQ ID NO: 2888 - RNA, 23 nt, Homo sapiens
  source 1..23: mol_type = genomic RNA
tgcacatggcaacctagctccca

SEQ ID NO: 2889 - RNA, 21 nt, Homo sapiens
  source 1..21: mol_type = genomic RNA
ggctgggtgctcttgtgcagt

SEQ ID NO: 2890 - RNA, 21 nt, Homo sapiens
  source 1..21: mol_type = genomic RNA
taaagtaaatatgcaccaaaa

SEQ ID NO: 2891 - RNA, 21 nt, Homo sapiens
  source 1..21: mol_type = genomic RNA
aataaagttcatgtatggcaa

SEQ ID NO: 2892 - RNA, 21 nt, Homo sapiens
  source 1..21: mol_type = genomic RNA
ttgccatacatagactttatt

SEQ ID NO: 2893 - RNA, 21 nt, Homo sapiens
  source 1..21: mol_type = genomic RNA
atacccatagcttagctccca

SEQ ID NO: 2894 - RNA, 21 nt, Homo sapiens
  source 1..21: mol_type = genomic RNA
tgggagctaagctatgggtat

SEQ ID NO: 2895 - RNA, 22 nt, Homo sapiens
  source 1..22: mol_type = genomic RNA
caaagtttaagatccttgaagt

SEQ ID NO: 2896 - RNA, 22 nt, Homo sapiens
  source 1..22: mol_type = genomic RNA
atcaaggatcttaaactttgcc

SEQ ID NO: 2897 - RNA, 20 nt, Homo sapiens
  source 1..20: mol_type = genomic RNA
aaagtagctgtaccatttgc

SEQ ID NO: 2898 - RNA, 19 nt, Homo sapiens
  source 1..19: mol_type = genomic RNA
aggttgacatacgtttccc

SEQ ID NO: 2899 - RNA, 19 nt, Homo sapiens
  source 1..19: mol_type = genomic RNA
aggcacggtgtcagcaggc

SEQ ID NO: 2900 - RNA, 19 nt, Homo sapiens
  source 1..19: mol_type = genomic RNA
gggcgcctgtgatcccaac

SEQ ID NO: 2901 - RNA, 23 nt, Homo sapiens
  source 1..23: mol_type = genomic RNA
agtatgttcttccaggacagaac

SEQ ID NO: 2902 - RNA, 20 nt, Homo sapiens
  source 1..20: mol_type = genomic RNA
atgtataaatgtatacacac

SEQ ID NO: 2903 - RNA, 22 nt, Homo sapiens
  source 1..22: mol_type = genomic RNA
gagaaatgctggactaatctgc

SEQ ID NO: 2904 - RNA, 22 nt, Homo sapiens
  source 1..22: mol_type = genomic RNA
agaaagggtggcaatacctctt

SEQ ID NO: 2905 - RNA, 22 nt, Homo sapiens
  source 1..22: mol_type = genomic RNA
aggtattgccaccctttctagt

SEQ ID NO: 2906 - RNA, 22 nt, Homo sapiens
  source 1..22: mol_type = genomic RNA
gtagcaccttgcaggataaggt

SEQ ID NO: 2907 - RNA, 24 nt, Homo sapiens
  source 1..24: mol_type = genomic RNA
tacagatgcagattctctgacttc

SEQ ID NO: 2908 - RNA, 20 nt, Homo sapiens
  source 1..20: mol_type = genomic RNA
aactctagcctgagcaacag

SEQ ID NO: 2909 - RNA, 22 nt, Homo sapiens
  source 1..22: mol_type = genomic RNA
acagcccagcagttatcacggg

SEQ ID NO: 2910 - RNA, 21 nt, Homo sapiens
  source 1..21: mol_type = genomic RNA
tatcgtatcgtattgtattgt

SEQ ID NO: 2911 - RNA, 22 nt, Homo sapiens
  source 1..22: mol_type = genomic RNA
ttagaacgttttagggtcaaat

SEQ ID NO: 2912 - RNA, 22 nt, Homo sapiens
  source 1..22: mol_type = genomic RNA
taacaaacacctgtaaaacagc

SEQ ID NO: 2913 - RNA, 22 nt, Homo sapiens
  source 1..22: mol_type = genomic RNA
agcatacacctgtagtcctaga

SEQ ID NO: 2914 - RNA, 21 nt, Homo sapiens
  source 1..21: mol_type = genomic RNA
agttaatgaatcctggaaagt

SEQ ID NO: 2915 - RNA, 21 nt, Homo sapiens
  source 1..21: mol_type = genomic RNA
tcagctactacctctattagg

SEQ ID NO: 2916 - RNA, 22 nt, Homo sapiens
  source 1..22: mol_type = genomic RNA
ttgctctgagctccgagaaagc

SEQ ID NO: 2917 - RNA, 22 nt, Homo sapiens
  source 1..22: mol_type = genomic RNA
caaataataccacagtgggtgt

SEQ ID NO: 2918 - RNA, 20 nt, Homo sapiens
  source 1..20: mol_type = genomic RNA
aataatatcacagtaggtgt

SEQ ID NO: 2919 - RNA, 22 nt, Homo sapiens
  source 1..22: mol_type = genomic RNA
aataatatcacagtaggtgtac

SEQ ID NO: 2920 - RNA, 22 nt, Homo sapiens
  source 1..22: mol_type = genomic RNA
gcagtggctctgaaatgaactc

SEQ ID NO: 2921 - RNA, 21 nt, Homo sapiens
  source 1..21: mol_type = genomic RNA
cagatcatgggactgtctcag

SEQ ID NO: 2922 - RNA, 22 nt, Homo sapiens
  source 1..22: mol_type = genomic RNA
actccaagaagaatctagacag

SEQ ID NO: 2923 - RNA, 22 nt, Homo sapiens
  source 1..22: mol_type = genomic RNA
ctcatttaagtagtctgatgcc

SEQ ID NO: 2924 - RNA, 22 nt, Homo sapiens
  source 1..22: mol_type = genomic RNA
tcaagtagtttcatgataaagg

SEQ ID NO: 2925 - RNA, 22 nt, Homo sapiens
  source 1..22: mol_type = genomic RNA
tgggggagtgcagtgattgtgg

SEQ ID NO: 2926 - RNA, 22 nt, Homo sapiens
  source 1..22: mol_type = genomic RNA
tcctgtctttccttgttggagc

SEQ ID NO: 2927 - RNA, 22 nt, Homo sapiens
  source 1..22: mol_type = genomic RNA
taatgcattaaattattgaagg

SEQ ID NO: 2928 - RNA, 19 nt, Homo sapiens
  source 1..19: mol_type = genomic RNA
ttattgtcacgttctgatt

SEQ ID NO: 2929 - RNA, 22 nt, Homo sapiens
  source 1..22: mol_type = genomic RNA
tgagtcagcaacatatcccatg

SEQ ID NO: 2930 - RNA, 18 nt, Homo sapiens
  source 1..18: mol_type = genomic RNA
aggagaagtcgggaaggt

SEQ ID NO: 2931 - RNA, 22 nt, Homo sapiens
  source 1..22: mol_type = genomic RNA
cgaaaacagcaattacctttgc

SEQ ID NO: 2932 - RNA, 22 nt, Homo sapiens
  source 1..22: mol_type = genomic RNA
ttaggccatcatcccattatgc

SEQ ID NO: 2933 - RNA, 23 nt, Homo sapiens
  source 1..23: mol_type = genomic RNA
tgtttcggggctcatggcctgtg

SEQ ID NO: 2934 - RNA, 22 nt, Homo sapiens
  source 1..22: mol_type = genomic RNA
aaaggtaattgcagtttttccc

SEQ ID NO: 2935 - RNA, 22 nt, Homo sapiens
  source 1..22: mol_type = genomic RNA
ttctggataacatgctgaagct

SEQ ID NO: 2936 - RNA, 22 nt, Homo sapiens
  source 1..22: mol_type = genomic RNA
acgtttgaatgctgtacaaggc

SEQ ID NO: 2937 - RNA, 20 nt, Homo sapiens
  source 1..20: mol_type = genomic RNA
atgagcgactgtgcctgacc

SEQ ID NO: 2938 - RNA, 21 nt, Homo sapiens
  source 1..21: mol_type = genomic RNA
tgagttggccatctgagtgag

SEQ ID NO: 2939 - RNA, 20 nt, Homo sapiens
  source 1..20: mol_type = genomic RNA
gtccgctcggcggtggccca

SEQ ID NO: 2940 - RNA, 24 nt, Homo sapiens
  source 1..24: mol_type = genomic RNA
ctgaagtgatgtgtaactgatcag

SEQ ID NO: 2941 - RNA, 20 nt, Homo sapiens
  source 1..20: mol_type = genomic RNA
gcggagagagaatggggagc

SEQ ID NO: 2942 - RNA, 22 nt, Homo sapiens
  source 1..22: mol_type = genomic RNA
cacgctcatgcacacacccaca

SEQ ID NO: 2943 - RNA, 23 nt, Homo sapiens
  source 1..23: mol_type = genomic RNA
tgagtgtgtgtgtgtgagtgtgt

SEQ ID NO: 2944 - RNA, 19 nt, Homo sapiens
  source 1..19: mol_type = genomic RNA
gagccagttggacaggagc

SEQ ID NO: 2945 - RNA, 22 nt, Homo sapiens
  source 1..22: mol_type = genomic RNA
aagatgtggaaaaattggaatc

SEQ ID NO: 2946 - RNA, 22 nt, Homo sapiens
  source 1..22: mol_type = genomic RNA
attctaatttctccacgtcttt

SEQ ID NO: 2947 - RNA, 21 nt, Homo sapiens
  source 1..21: mol_type = genomic RNA
tagataaaatattggtacctg

SEQ ID NO: 2948 - RNA, 21 nt, Homo sapiens
  source 1..21: mol_type = genomic RNA
cttcttgtgctctaggattgt

SEQ ID NO: 2949 - RNA, 20 nt, Homo sapiens
  source 1..20: mol_type = genomic RNA
gggctggggcgcggggaggt

SEQ ID NO: 2950 - RNA, 23 nt, Homo sapiens
  source 1..23: mol_type = genomic RNA
ttcatttggtataaaccgcgatt

SEQ ID NO: 2951 - RNA, 22 nt, Homo sapiens
  source 1..22: mol_type = genomic RNA
ttgagaatgatgaatcattagg

SEQ ID NO: 2952 - RNA, 21 nt, Homo sapiens
  source 1..21: mol_type = genomic RNA
tcttgtgttctctagatcagt

SEQ ID NO: 2953 - RNA, 22 nt, Homo sapiens
  source 1..22: mol_type = genomic RNA
taactggttgaacaactgaacc

SEQ ID NO: 2954 - RNA, 23 nt, Homo sapiens
  source 1..23: mol_type = genomic RNA
ttacagttgttcaaccagttact

SEQ ID NO: 2955 - RNA, 21 nt, Homo sapiens
  source 1..21: mol_type = genomic RNA
caaagaggaaggtcccattac

SEQ ID NO: 2956 - RNA, 22 nt, Homo sapiens
  source 1..22: mol_type = genomic RNA
tcagttccaggccaaccaggct

SEQ ID NO: 2957 - RNA, 22 nt, Homo sapiens
  source 1..22: mol_type = genomic RNA
ttatggtttgcctgggactgag

SEQ ID NO: 2958 - RNA, 19 nt, Homo sapiens
  source 1..19: mol_type = genomic RNA
tgggcgtatctgtatgcta

SEQ ID NO: 2959 - RNA, 22 nt, Homo sapiens
  source 1..22: mol_type = genomic RNA
tatgcattgtatttttaggtcc

SEQ ID NO: 2960 - RNA, 21 nt, Homo sapiens
  source 1..21: mol_type = genomic RNA
tttccataggtgatgagtcac

SEQ ID NO: 2961 - RNA, 21 nt, Homo sapiens
  source 1..21: mol_type = genomic RNA
ttggccacaatgggttagaac

SEQ ID NO: 2962 - RNA, 24 nt, Homo sapiens
  source 1..24: mol_type = genomic RNA
tcagaacaaatgccggttcccaga

SEQ ID NO: 2963 - RNA, 22 nt, Homo sapiens
  source 1..22: mol_type = genomic RNA
tgagaaccacgtctgctctgag

SEQ ID NO: 2964 - RNA, 21 nt, Homo sapiens
  source 1..21: mol_type = genomic RNA
taattttatgtataagctagt

SEQ ID NO: 2965 - RNA, 22 nt, Homo sapiens
  source 1..22: mol_type = genomic RNA
gagcttattcataaaagtgcag

SEQ ID NO: 2966 - RNA, 20 nt, Homo sapiens
  source 1..20: mol_type = genomic RNA
agaccatgggttctcattgt

SEQ ID NO: 2967 - RNA, 22 nt, Homo sapiens
  source 1..22: mol_type = genomic RNA
ttgtgtcaatatgcgatgatgt

SEQ ID NO: 2968 - RNA, 19 nt, Homo sapiens
  source 1..19: mol_type = genomic RNA
tgtctctgctggggtttct

SEQ ID NO: 2969 - RNA, 25 nt, Homo sapiens
  source 1..25: mol_type = genomic RNA
aggcaccagccaggcattgctcagc

SEQ ID NO: 2970 - RNA, 21 nt, Homo sapiens
  source 1..21: mol_type = genomic RNA
gaagtgtgccgtggtgtgtct

SEQ ID NO: 2971 - RNA, 21 nt, Homo sapiens
  source 1..21: mol_type = genomic RNA
aagcctgcccggctcctcggg

SEQ ID NO: 2972 - RNA, 22 nt, Homo sapiens
  source 1..22: mol_type = genomic RNA
tgtgtcactcgatgaccactgt

SEQ ID NO: 2973 - RNA, 22 nt, Homo sapiens
  source 1..22: mol_type = genomic RNA
tacgtcatcgttgtcatcgtca

SEQ ID NO: 2974 - RNA, 20 nt, Homo sapiens
  source 1..20: mol_type = genomic RNA
gttgtgtcagtttatcaaac

SEQ ID NO: 2975 - RNA, 23 nt, Homo sapiens
  source 1..23: mol_type = genomic RNA
acttacagacaagagccttgctc

SEQ ID NO: 2976 - RNA, 22 nt, Homo sapiens
  source 1..22: mol_type = genomic RNA
tggtctaggattgttggaggag

SEQ ID NO: 2977 - RNA, 23 nt, Homo sapiens
  source 1..23: mol_type = genomic RNA
gacacgggcgacagctgcggccc

SEQ ID NO: 2978 - RNA, 22 nt, Homo sapiens
  source 1..22: mol_type = genomic RNA
cacacactgcaattacttttgc

SEQ ID NO: 2979 - RNA, 19 nt, Homo sapiens
  source 1..19: mol_type = genomic RNA
aggctgcggaattcaggac

SEQ ID NO: 2980 - RNA, 23 nt, Homo sapiens
  source 1..23: mol_type = genomic RNA
taaatcccatggtgccttctcct

SEQ ID NO: 2981 - RNA, 21 nt, Homo sapiens
  source 1..21: mol_type = genomic RNA
aaactactgaaaatcaaagat

SEQ ID NO: 2982 - RNA, 21 nt, Homo sapiens
  source 1..21: mol_type = genomic RNA
cctgcgagtctccggcggtgg

SEQ ID NO: 2983 - RNA, 21 nt, Homo sapiens
  source 1..21: mol_type = genomic RNA
gggctagggcctgctgccccc

SEQ ID NO: 2984 - RNA, 21 nt, Homo sapiens
  source 1..21: mol_type = genomic RNA
gttcaaatccagatctataac

SEQ ID NO: 2985 - RNA, 19 nt, Homo sapiens
  source 1..19: mol_type = genomic RNA
ccggttccagtccctggag

SEQ ID NO: 2986 - RNA, 19 nt, Homo sapiens
  source 1..19: mol_type = genomic RNA
ttctgctgccggccaaggc

SEQ ID NO: 2987 - RNA, 22 nt, Homo sapiens
  source 1..22: mol_type = genomic RNA
tcctcatcacactgcaccttag

SEQ ID NO: 2988 - RNA, 20 nt, Homo sapiens
  source 1..20: mol_type = genomic RNA
ggtagtgagttatcagctac

SEQ ID NO: 2989 - RNA, 20 nt, Homo sapiens
  source 1..20: mol_type = genomic RNA
gatattcagaggctaggtgg

SEQ ID NO: 2990 - RNA, 21 nt, Homo sapiens
  source 1..21: mol_type = genomic RNA
acggcccaggcggcattggtg

SEQ ID NO: 2991 - RNA, 21 nt, Homo sapiens
  source 1..21: mol_type = genomic RNA
agcatgacagaggagaggtgg

SEQ ID NO: 2992 - RNA, 21 nt, Homo sapiens
  source 1..21: mol_type = genomic RNA
gggaagagctgtacggccttc

SEQ ID NO: 2993 - RNA, 19 nt, Homo sapiens
  source 1..19: mol_type = genomic RNA
ccgcctgagctagctgtgg

SEQ ID NO: 2994 - RNA, 24 nt, Homo sapiens
  source 1..24: mol_type = genomic RNA
ttggaagcttggaccaactagctg

SEQ ID NO: 2995 - RNA, 25 nt, Homo sapiens
  source 1..25: mol_type = genomic RNA
aggggtggtgttgggacagctccgt

SEQ ID NO: 2996 - RNA, 19 nt, Homo sapiens
  source 1..19: mol_type = genomic RNA
tctagtgcgggcgttcccg

SEQ ID NO: 2997 - RNA, 24 nt, Homo sapiens
  source 1..24: mol_type = genomic RNA
aggagcagtgccggccaaggcgcc

SEQ ID NO: 2998 - RNA, 19 nt, Homo sapiens
  source 1..19: mol_type = genomic RNA
gaatacgtctggttgatcc

SEQ ID NO: 2999 - RNA, 20 nt, Homo sapiens
  source 1..20: mol_type = genomic RNA
cttatatcagaggctgtggg

SEQ ID NO: 3000 - RNA, 20 nt, Homo sapiens
  source 1..20: mol_type = genomic RNA
ttccgccagtcggtggccgg

SEQ ID NO: 3001 - RNA, 19 nt, Homo sapiens
  source 1..19: mol_type = genomic RNA
aaggggctgggggagcaca

SEQ ID NO: 3002 - RNA, 20 nt, Homo sapiens
  source 1..20: mol_type = genomic RNA
ggaggttgggaagggcagag

SEQ ID NO: 3003 - RNA, 18 nt, Homo sapiens
  source 1..18: mol_type = genomic RNA
tgaggcgggggggcgagc

SEQ ID NO: 3004 - RNA, 20 nt, Homo sapiens
  source 1..20: mol_type = genomic RNA
agagatgaagcgggggggcg

SEQ ID NO: 3005 - RNA, 24 nt, Homo sapiens
  source 1..24: mol_type = genomic RNA
ggaggccggggtggggcggggcgg

SEQ ID NO: 3006 - RNA, 20 nt, Homo sapiens
  source 1..20: mol_type = genomic RNA
agggtgtttctctcatctct

SEQ ID NO: 3007 - RNA, 19 nt, Homo sapiens
  source 1..19: mol_type = genomic RNA
ggggagcgaggggcggggc

SEQ ID NO: 3008 - RNA, 21 nt, Homo sapiens
  source 1..21: mol_type = genomic RNA
tgagctaaatgtgtgctggga

SEQ ID NO: 3009 - RNA, 23 nt, Homo sapiens
  source 1..23: mol_type = genomic RNA
gcgaggacccctcggggtctgac

SEQ ID NO: 3010 - RNA, 25 nt, Homo sapiens
  source 1..25: mol_type = genomic RNA
gctgggcagggcttctgagctcctt

SEQ ID NO: 3011 - RNA, 20 nt, Homo sapiens
  source 1..20: mol_type = genomic RNA
gggaaaaggaagggggagga

SEQ ID NO: 3012 - RNA, 20 nt, Homo sapiens
  source 1..20: mol_type = genomic RNA
gcggaaggcggagcggcgga

SEQ ID NO: 3013 - RNA, 18 nt, Homo sapiens
  source 1..18: mol_type = genomic RNA
gtgaaggcccggcggaga

SEQ ID NO: 3014 - RNA, 19 nt, Homo sapiens
  source 1..19: mol_type = genomic RNA
tgagggagtgggtgggagg

SEQ ID NO: 3015 - RNA, 19 nt, Homo sapiens
  source 1..19: mol_type = genomic RNA
actggaattggagtcaaaa

SEQ ID NO: 3016 - RNA, 19 nt, Homo sapiens
  source 1..19: mol_type = genomic RNA
tgagggagttgggtgtata

SEQ ID NO: 3017 - RNA, 20 nt, Homo sapiens
  source 1..20: mol_type = genomic RNA
aggaatgttccttctttgcc

SEQ ID NO: 3018 - RNA, 19 nt, Homo sapiens
  source 1..19: mol_type = genomic RNA
tgagggagtggattgtatg

SEQ ID NO: 3019 - RNA, 19 nt, Homo sapiens
  source 1..19: mol_type = genomic RNA
ggctggtcagatgggagtg

SEQ ID NO: 3020 - RNA, 19 nt, Homo sapiens
  source 1..19: mol_type = genomic RNA
agcagggctggggattgca

SEQ ID NO: 3021 - RNA, 19 nt, Homo sapiens
  source 1..19: mol_type = genomic RNA
tgagggaggaggttgggta

SEQ ID NO: 3022 - RNA, 19 nt, Homo sapiens
  source 1..19: mol_type = genomic RNA
tgaggtggtaggatgtaga

SEQ ID NO: 3023 - RNA, 23 nt, Homo sapiens
  source 1..23: mol_type = genomic RNA
gaacgcctgttcttgccaggtgg

SEQ ID NO: 3024 - RNA, 22 nt, Homo sapiens
  source 1..22: mol_type = genomic RNA
tccgagcctgggtctccctctt

SEQ ID NO: 3025 - RNA, 22 nt, Homo sapiens
  source 1..22: mol_type = genomic RNA
gggggtccccggtgctcggatc

SEQ ID NO: 3026 - RNA, 22 nt, Homo sapiens
  source 1..22: mol_type = genomic RNA
agtcattggagggtttgagcag

SEQ ID NO: 3027 - RNA, 19 nt, Homo sapiens
  source 1..19: mol_type = genomic RNA
cagcaggaggtgaggggag

SEQ ID NO: 3028 - RNA, 22 nt, Homo sapiens
  source 1..22: mol_type = genomic RNA
actcaaaacccttcagtgactt

SEQ ID NO: 3029 - RNA, 22 nt, Homo sapiens
  source 1..22: mol_type = genomic RNA
agacttcccatttgaaggtggc

SEQ ID NO: 3030 - RNA, 23 nt, Homo sapiens
  source 1..23: mol_type = genomic RNA
aaactctacttgtccttctgagt

SEQ ID NO: 3031 - RNA, 24 nt, Homo sapiens
  source 1..24: mol_type = genomic RNA
gacctggacatgtttgtgcccagt

SEQ ID NO: 3032 - RNA, 20 nt, Homo sapiens
  source 1..20: mol_type = genomic RNA
atggagatagatatagaaat

SEQ ID NO: 3033 - RNA, 21 nt, Homo sapiens
  source 1..21: mol_type = genomic RNA
ggctagcaacagcgcttacct

SEQ ID NO: 3034 - RNA, 21 nt, Homo sapiens
  source 1..21: mol_type = genomic RNA
acagtctgctgaggttggagc

SEQ ID NO: 3035 - RNA, 23 nt, Homo sapiens
  source 1..23: mol_type = genomic RNA
atcccttgcaggggctgttgggt

SEQ ID NO: 3036 - RNA, 21 nt, Homo sapiens
  source 1..21: mol_type = genomic RNA
cacaaggtattggtattacct

SEQ ID NO: 3037 - RNA, 22 nt, Homo sapiens
  source 1..22: mol_type = genomic RNA
tagtaccagtaccttgtgttca

SEQ ID NO: 3038 - RNA, 22 nt, Homo sapiens
  source 1..22: mol_type = genomic RNA
gactatagaactttccccctca

SEQ ID NO: 3039 - RNA, 21 nt, Homo sapiens
  source 1..21: mol_type = genomic RNA
agggggaaagttctatagtcc

SEQ ID NO: 3040 - RNA, 19 nt, Homo sapiens
  source 1..19: mol_type = genomic RNA
agctgtctgaaaatgtctt

SEQ ID NO: 3041 - RNA, 22 nt, Homo sapiens
  source 1..22: mol_type = genomic RNA
gtgagtctctaagaaaagagga

SEQ ID NO: 3042 - RNA, 21 nt, Homo sapiens
  source 1..21: mol_type = genomic RNA
tctagtaagagtggcagtcga

SEQ ID NO: 3043 - RNA, 22 nt, Homo sapiens
  source 1..22: mol_type = genomic RNA
atgctgacatatttactagagg

SEQ ID NO: 3044 - RNA, 22 nt, Homo sapiens
  source 1..22: mol_type = genomic RNA
gttctcccaacgtaagcccagc

SEQ ID NO: 3045 - RNA, 21 nt, Homo sapiens
  source 1..21: mol_type = genomic RNA
tgggtttacgttgggagaact

SEQ ID NO: 3046 - RNA, 22 nt, Homo sapiens
  source 1..22: mol_type = genomic RNA
agtattctgtaccagggaaggt

SEQ ID NO: 3047 - RNA, 21 nt, Homo sapiens
  source 1..21: mol_type = genomic RNA
agacctggcccagacctcagc

SEQ ID NO: 3048 - RNA, 19 nt, Homo sapiens
  source 1..19: mol_type = genomic RNA
gtgtctgcttcctgtggga

SEQ ID NO: 3049 - RNA, 23 nt, Homo sapiens
  source 1..23: mol_type = genomic RNA
ctaatagtatctaccacaataaa

SEQ ID NO: 3050 - RNA, 22 nt, Homo sapiens
  source 1..22: mol_type = genomic RNA
aaccagcaccccaactttggac

SEQ ID NO: 3051 - RNA, 23 nt, Homo sapiens
  source 1..23: mol_type = genomic RNA
acttgggcactgaaacaatgtcc

SEQ ID NO: 3052 - RNA, 23 nt, Homo sapiens
  source 1..23: mol_type = genomic RNA
tgtgcttgctcgtcccgcccgca

SEQ ID NO: 3053 - RNA, 24 nt, Homo sapiens
  source 1..24: mol_type = genomic RNA
actgggggctttcgggctctgcgt

SEQ ID NO: 3054 - RNA, 25 nt, Homo sapiens
  source 1..25: mol_type = genomic RNA
agggatcgcgggcgggtggcggcct

SEQ ID NO: 3055 - RNA, 23 nt, Homo sapiens
  source 1..23: mol_type = genomic RNA
atcgctgcggttgcgagcgctgt

SEQ ID NO: 3056 - RNA, 21 nt, Homo sapiens
  source 1..21: mol_type = genomic RNA
atgatccaggaacctgcctct

SEQ ID NO: 3057 - RNA, 24 nt, Homo sapiens
  source 1..24: mol_type = genomic RNA
aaagacataggatagagtcacctc

SEQ ID NO: 3058 - RNA, 22 nt, Homo sapiens
  source 1..22: mol_type = genomic RNA
agacacatttggagagggaacc

SEQ ID NO: 3059 - RNA, 22 nt, Homo sapiens
  source 1..22: mol_type = genomic RNA
gtccctctccaaatgtgtcttg

SEQ ID NO: 3060 - RNA, 22 nt, Homo sapiens
  source 1..22: mol_type = genomic RNA
agacacatttggagagggaccc

SEQ ID NO: 3061 - RNA, 22 nt, Homo sapiens
  source 1..22: mol_type = genomic RNA
ggttccctctccaaatgtgtct

SEQ ID NO: 3062 - RNA, 22 nt, Homo sapiens
  source 1..22: mol_type = genomic RNA
acttgtatgctagctcaggtag

SEQ ID NO: 3063 - RNA, 19 nt, Homo sapiens
  source 1..19: mol_type = genomic RNA
agtgtggctttcttagagc

SEQ ID NO: 3064 - RNA, 19 nt, Homo sapiens
  source 1..19: mol_type = genomic RNA
tctaggctggtactgctga

SEQ ID NO: 3065 - RNA, 19 nt, Homo sapiens
  source 1..19: mol_type = genomic RNA
aagcagctgcctctgaggc

SEQ ID NO: 3066 - RNA, 21 nt, Homo sapiens
  source 1..21: mol_type = genomic RNA
gtggctgcactcacttccttc

SEQ ID NO: 3067 - RNA, 19 nt, Homo sapiens
  source 1..19: mol_type = genomic RNA
aagtgtgcagggcactggt

SEQ ID NO: 3068 - RNA, 22 nt, Homo sapiens
  source 1..22: mol_type = genomic RNA
aaacctgtgttgttcaagagtc

SEQ ID NO: 3069 - RNA, 22 nt, Homo sapiens
  source 1..22: mol_type = genomic RNA
agcagtgtttgttttgcccaca

SEQ ID NO: 3070 - RNA, 22 nt, Homo sapiens
  source 1..22: mol_type = genomic RNA
tcgggcgcaagagcactgcagt

SEQ ID NO: 3071 - RNA, 21 nt, Homo sapiens
  source 1..21: mol_type = genomic RNA
aggaggcagcgctctcaggac

SEQ ID NO: 3072 - RNA, 21 nt, Homo sapiens
  source 1..21: mol_type = genomic RNA
acacttgttgggatgacctgc

SEQ ID NO: 3073 - RNA, 24 nt, Homo sapiens
  source 1..24: mol_type = genomic RNA
aggagctatccactccaggtgtcc

SEQ ID NO: 3074 - RNA, 23 nt, Homo sapiens
  source 1..23: mol_type = genomic RNA
ccagagcagcctgcggtaacagt

SEQ ID NO: 3075 - RNA, 22 nt, Homo sapiens
  source 1..22: mol_type = genomic RNA
agttgccagggctgcctttggt

SEQ ID NO: 3076 - RNA, 21 nt, Homo sapiens
  source 1..21: mol_type = genomic RNA
tagaccatctttctagagtat

SEQ ID NO: 3077 - RNA, 22 nt, Homo sapiens
  source 1..22: mol_type = genomic RNA
agctctagaaagattgttgacc

SEQ ID NO: 3078 - RNA, 21 nt, Homo sapiens
  source 1..21: mol_type = genomic RNA
gggactaggatgcagacctcc

SEQ ID NO: 3079 - RNA, 23 nt, Homo sapiens
  source 1..23: mol_type = genomic RNA
aggtctgcattcaaatccccaga

SEQ ID NO: 3080 - RNA, 20 nt, Homo sapiens
  source 1..20: mol_type = genomic RNA
cattacagcacagccattct

SEQ ID NO: 3081 - RNA, 21 nt, Homo sapiens
  source 1..21: mol_type = genomic RNA
tctggctgtgctgtaatgcag

SEQ ID NO: 3082 - RNA, 21 nt, Homo sapiens
  source 1..21: mol_type = genomic RNA
tgacttctacctcttccaaag

SEQ ID NO: 3083 - RNA, 22 nt, Homo sapiens
  source 1..22: mol_type = genomic RNA
ttggaataggggatatctcagc

SEQ ID NO: 3084 - RNA, 22 nt, Homo sapiens
  source 1..22: mol_type = genomic RNA
tcgtatcagagattccagacac

SEQ ID NO: 3085 - RNA, 23 nt, Homo sapiens
  source 1..23: mol_type = genomic RNA
actgggatgtcactgaatatggt

SEQ ID NO: 3086 - RNA, 22 nt, Homo sapiens
  source 1..22: mol_type = genomic RNA
caaagtccttcctatttttccc

SEQ ID NO: 3087 - RNA, 21 nt, Homo sapiens
  source 1..21: mol_type = genomic RNA
gaagaataggagggactttgt

SEQ ID NO: 3088 - RNA, 22 nt, Homo sapiens
  source 1..22: mol_type = genomic RNA
tgggccatgcatttctagaact

SEQ ID NO: 3089 - RNA, 21 nt, Homo sapiens
  source 1..21: mol_type = genomic RNA
tctagaaatgcatgacccacc

SEQ ID NO: 3090 - RNA, 22 nt, Homo sapiens
  source 1..22: mol_type = genomic RNA
ttccactgccactacctaattt

SEQ ID NO: 3091 - RNA, 21 nt, Homo sapiens
  source 1..21: mol_type = genomic RNA
attaggtagtggcagtggaac

SEQ ID NO: 3092 - RNA, 22 nt, Homo sapiens
  source 1..22: mol_type = genomic RNA
tttaggataagcttgacttttg

SEQ ID NO: 3093 - RNA, 21 nt, Homo sapiens
  source 1..21: mol_type = genomic RNA
caccgactctgtctcctgcag

SEQ ID NO: 3094 - RNA, 22 nt, Homo sapiens
  source 1..22: mol_type = genomic RNA
cagcaggggagagagaggagtc

SEQ ID NO: 3095 - RNA, 22 nt, Homo sapiens
  source 1..22: mol_type = genomic RNA
cctcaccatcccttctgcctgc

SEQ ID NO: 3096 - RNA, 23 nt, Homo sapiens
  source 1..23: mol_type = genomic RNA
caggcagaagtggggctgacagg

SEQ ID NO: 3097 - RNA, 23 nt, Homo sapiens
  source 1..23: mol_type = genomic RNA
cctcaccaccccttctgcctgca

SEQ ID NO: 3098 - RNA, 24 nt, Homo sapiens
  source 1..24: mol_type = genomic RNA
ctgcaggcagaagtggggctgaca

SEQ ID NO: 3099 - RNA, 22 nt, Homo sapiens
  source 1..22: mol_type = genomic RNA
ttccagcccttctaatggtagg

SEQ ID NO: 3100 - RNA, 22 nt, Homo sapiens
  source 1..22: mol_type = genomic RNA
taccattagaagagctggaaga

SEQ ID NO: 3101 - RNA, 21 nt, Homo sapiens
  source 1..21: mol_type = genomic RNA
tcaagtgtcatctgtccctag

SEQ ID NO: 3102 - RNA, 23 nt, Homo sapiens
  source 1..23: mol_type = genomic RNA
tttgggattgacgccacatgtct

SEQ ID NO: 3103 - RNA, 21 nt, Homo sapiens
  source 1..21: mol_type = genomic RNA
ctgcctgttcttccactccag

SEQ ID NO: 3104 - RNA, 23 nt, Homo sapiens
  source 1..23: mol_type = genomic RNA
tatggagtggactttcagctggc

SEQ ID NO: 3105 - RNA, 20 nt, Homo sapiens
  source 1..20: mol_type = genomic RNA
tctcttcatctaccccccag

SEQ ID NO: 3106 - RNA, 21 nt, Homo sapiens
  source 1..21: mol_type = genomic RNA
ttggagggtgtggaagacatc

SEQ ID NO: 3107 - RNA, 21 nt, Homo sapiens
  source 1..21: mol_type = genomic RNA
aatggcgccactagggttgtg

SEQ ID NO: 3108 - RNA, 25 nt, Homo sapiens
  source 1..25: mol_type = genomic RNA
caaccctaggagagggtgccattca

SEQ ID NO: 3109 - RNA, 21 nt, Homo sapiens
  source 1..21: mol_type = genomic RNA
gtgttgaaacaatctctactg

SEQ ID NO: 3110 - RNA, 22 nt, Homo sapiens
  source 1..22: mol_type = genomic RNA
tatgtctgctgaccatcacctt

SEQ ID NO: 3111 - RNA, 22 nt, Homo sapiens
  source 1..22: mol_type = genomic RNA
tggtgggccgcagaacatgtgc

SEQ ID NO: 3112 - RNA, 22 nt, Homo sapiens
  source 1..22: mol_type = genomic RNA
ataatacatggttaacctcttt

SEQ ID NO: 3113 - RNA, 21 nt, Homo sapiens
  source 1..21: mol_type = genomic RNA
aatattatacagtcaacctct

SEQ ID NO: 3114 - RNA, 23 nt, Homo sapiens
  source 1..23: mol_type = genomic RNA
ggcaggttctcaccctctctagg

SEQ ID NO: 3115 - RNA, 25 nt, Homo sapiens
  source 1..25: mol_type = genomic RNA
ggcggagggaagtaggtccgttggt

SEQ ID NO: 3116 - RNA, 22 nt, Homo sapiens
  source 1..22: mol_type = genomic RNA
cttggttcagggagggtcccca

SEQ ID NO: 3117 - RNA, 22 nt, Homo sapiens
  source 1..22: mol_type = genomic RNA
aggaccttccctgaaccaagga

SEQ ID NO: 3118 - RNA, 21 nt, Homo sapiens
  source 1..21: mol_type = genomic RNA
acctcctgtgtgcatggatta

SEQ ID NO: 3119 - RNA, 22 nt, Homo sapiens
  source 1..22: mol_type = genomic RNA
tacccattgcatatcggagttg

SEQ ID NO: 3120 - RNA, 24 nt, Homo sapiens
  source 1..24: mol_type = genomic RNA
tgcctgggtctctggcctgcgcgt

SEQ ID NO: 3121 - RNA, 21 nt, Homo sapiens
  source 1..21: mol_type = genomic RNA
tcccacgttgtggcccagcag

SEQ ID NO: 3122 - RNA, 22 nt, Homo sapiens
  source 1..22: mol_type = genomic RNA
aggcggggcgccgcgggaccgc

SEQ ID NO: 3123 - RNA, 22 nt, Homo sapiens
  source 1..22: mol_type = genomic RNA
ggtggcccggccgtgcctgagg

SEQ ID NO: 3124 - RNA, 23 nt, Homo sapiens
  source 1..23: mol_type = genomic RNA
tattcatttatccccagcctaca

SEQ ID NO: 3125 - RNA, 24 nt, Homo sapiens
  source 1..24: mol_type = genomic RNA
actggctagggaaaatgattggat

SEQ ID NO: 3126 - RNA, 22 nt, Homo sapiens
  source 1..22: mol_type = genomic RNA
ttcatttgcctcccagcctaca

SEQ ID NO: 3127 - RNA, 24 nt, Homo sapiens
  source 1..24: mol_type = genomic RNA
tgggctaagggagatgattgggta

SEQ ID NO: 3128 - RNA, 20 nt, Homo sapiens
  source 1..20: mol_type = genomic RNA
accaggaggctgaggcccct

SEQ ID NO: 3129 - RNA, 23 nt, Homo sapiens
  source 1..23: mol_type = genomic RNA
tgtcactcggctcggcccactac

SEQ ID NO: 3130 - RNA, 20 nt, Homo sapiens
  source 1..20: mol_type = genomic RNA
gtccctgagtgtatgtggtg

SEQ ID NO: 3131 - RNA, 21 nt, Homo sapiens
  source 1..21: mol_type = genomic RNA
tccggttctcagggctccacc

SEQ ID NO: 3132 - RNA, 21 nt, Homo sapiens
  source 1..21: mol_type = genomic RNA
ccaaaccagtcgtgcctgtgg

SEQ ID NO: 3133 - RNA, 22 nt, Homo sapiens
  source 1..22: mol_type = genomic RNA
ctcaaaccggctgtgcctgtgg

SEQ ID NO: 3134 - RNA, 21 nt, Homo sapiens
  source 1..21: mol_type = genomic RNA
acaggcacgactggtttggca

SEQ ID NO: 3135 - RNA, 23 nt, Homo sapiens
  source 1..23: mol_type = genomic RNA
aggaagccctggaggggctggag

SEQ ID NO: 3136 - RNA, 22 nt, Homo sapiens
  source 1..22: mol_type = genomic RNA
tccgaactctccattcctctgc

SEQ ID NO: 3137 - RNA, 20 nt, Homo sapiens
  source 1..20: mol_type = genomic RNA
tgggaatgggggtaagggcc

SEQ ID NO: 3138 - RNA, 22 nt, Homo sapiens
  source 1..22: mol_type = genomic RNA
aggcgatgtggggatgtagaga

SEQ ID NO: 3139 - RNA, 21 nt, Homo sapiens
  source 1..21: mol_type = genomic RNA
tagtggtcagagggcttatga

SEQ ID NO: 3140 - RNA, 22 nt, Homo sapiens
  source 1..22: mol_type = genomic RNA
tctgacatcagtgattctcctg

SEQ ID NO: 3141 - RNA, 22 nt, Homo sapiens
  source 1..22: mol_type = genomic RNA
cgcgcctgcaggaactggtaga

SEQ ID NO: 3142 - RNA, 23 nt, Homo sapiens
  source 1..23: mol_type = genomic RNA
tgggcaggggcttattgtaggag

SEQ ID NO: 3143 - RNA, 22 nt, Homo sapiens
  source 1..22: mol_type = genomic RNA
tgcaggggtcgggtgggccagg

SEQ ID NO: 3144 - RNA, 20 nt, Homo sapiens
  source 1..20: mol_type = genomic RNA
aggcgcacccgaccacatgc

SEQ ID NO: 3145 - RNA, 22 nt, Homo sapiens
  source 1..22: mol_type = genomic RNA
atagtccgagtaacgtcggggc

SEQ ID NO: 3146 - RNA, 23 nt, Homo sapiens
  source 1..23: mol_type = genomic RNA
ctgggcccgcggcgggcgtgggg

SEQ ID NO: 3147 - RNA, 20 nt, Homo sapiens
  source 1..20: mol_type = genomic RNA
ctgtatgccctcaccgctca

SEQ ID NO: 3148 - RNA, 23 nt, Homo sapiens
  source 1..23: mol_type = genomic RNA
tggtgcggagagggcccacagtg

SEQ ID NO: 3149 - RNA, 21 nt, Homo sapiens
  source 1..21: mol_type = genomic RNA
ctgtcctaaggttgttgagtt

SEQ ID NO: 3150 - RNA, 21 nt, Homo sapiens
  source 1..21: mol_type = genomic RNA
tcttcaacctcaggacttgca

SEQ ID NO: 3151 - RNA, 22 nt, Homo sapiens
  source 1..22: mol_type = genomic RNA
caactagactgtgagcttctag

SEQ ID NO: 3152 - RNA, 23 nt, Homo sapiens
  source 1..23: mol_type = genomic RNA
aaggagcttacaatctagctggg

SEQ ID NO: 3153 - RNA, 22 nt, Homo sapiens
  source 1..22: mol_type = genomic RNA
gggacccagggagagacgtaag

SEQ ID NO: 3154 - RNA, 22 nt, Homo sapiens
  source 1..22: mol_type = genomic RNA
caacaaatcacagtctgccata

SEQ ID NO: 3155 - RNA, 21 nt, Homo sapiens
  source 1..21: mol_type = genomic RNA
cttccgccccgccgggcgtcg

SEQ ID NO: 3156 - RNA, 22 nt, Homo sapiens
  source 1..22: mol_type = genomic RNA
caacaaatcccagtctacctaa

SEQ ID NO: 3157 - RNA, 22 nt, Homo sapiens
  source 1..22: mol_type = genomic RNA
ctgttgccactaacctcaacct

SEQ ID NO: 3158 - RNA, 22 nt, Homo sapiens
  source 1..22: mol_type = genomic RNA
tgcggggctagggctaacagca

SEQ ID NO: 3159 - RNA, 22 nt, Homo sapiens
  source 1..22: mol_type = genomic RNA
tttgtgacctggtccactaacc

SEQ ID NO: 3160 - RNA, 22 nt, Homo sapiens
  source 1..22: mol_type = genomic RNA
gatggttgaccagagagcacac

SEQ ID NO: 3161 - RNA, 22 nt, Homo sapiens
  source 1..22: mol_type = genomic RNA
gcagagtgcaaacaattttgac

SEQ ID NO: 3162 - RNA, 23 nt, Homo sapiens
  source 1..23: mol_type = genomic RNA
tggaagactagtgattttgttgt

SEQ ID NO: 3163 - RNA, 20 nt, Homo sapiens
  source 1..20: mol_type = genomic RNA
cggctctgggtctgtgggga

SEQ ID NO: 3164 - RNA, 22 nt, Homo sapiens
  source 1..22: mol_type = genomic RNA
gcagcagggtgaaactgacaca

SEQ ID NO: 3165 - RNA, 22 nt, Homo sapiens
  source 1..22: mol_type = genomic RNA
ggggctggggccggggccgagc

SEQ ID NO: 3166 - RNA, 22 nt, Homo sapiens
  source 1..22: mol_type = genomic RNA
gcaggtgctcacttgtcctcct

SEQ ID NO: 3167 - RNA, 21 nt, Homo sapiens
  source 1..21: mol_type = genomic RNA
tggaggagaaggaaggtgatg

SEQ ID NO: 3168 - RNA, 22 nt, Homo sapiens
  source 1..22: mol_type = genomic RNA
actccagccccacagcctcagc

SEQ ID NO: 3169 - RNA, 22 nt, Homo sapiens
  source 1..22: mol_type = genomic RNA
aggaggaattggtgctggtctt

SEQ ID NO: 3170 - RNA, 23 nt, Homo sapiens
  source 1..23: mol_type = genomic RNA
tctgctcataccccatggtttct

SEQ ID NO: 3171 - RNA, 23 nt, Homo sapiens
  source 1..23: mol_type = genomic RNA
tgcaccatggttgtctgagcatg

SEQ ID NO: 3172 - RNA, 23 nt, Homo sapiens
  source 1..23: mol_type = genomic RNA
ctgggatctccggggtcttggtt

SEQ ID NO: 3173 - RNA, 22 nt, Homo sapiens
  source 1..22: mol_type = genomic RNA
tgagacctctgggttctgagct

SEQ ID NO: 3174 - RNA, 23 nt, Homo sapiens
  source 1..23: mol_type = genomic RNA
tccagtaccacgtgtcagggcca

SEQ ID NO: 3175 - RNA, 23 nt, Homo sapiens
  source 1..23: mol_type = genomic RNA
cagtaacaaagattcatccttgt

SEQ ID NO: 3176 - RNA, 22 nt, Homo sapiens
  source 1..22: mol_type = genomic RNA
ggagactgatgagttcccggga

SEQ ID NO: 3177 - RNA, 21 nt, Homo sapiens
  source 1..21: mol_type = genomic RNA
gcaggaacttgtgagtctcct

SEQ ID NO: 3178 - RNA, 22 nt, Homo sapiens
  source 1..22: mol_type = genomic RNA
ctgccctggcccgagggaccga

SEQ ID NO: 3179 - RNA, 21 nt, Homo sapiens
  source 1..21: mol_type = genomic RNA
cctggaaacactgaggttgtg

SEQ ID NO: 3180 - RNA, 22 nt, Homo sapiens
  source 1..22: mol_type = genomic RNA
tatacctcagttttatcaggtg

SEQ ID NO: 3181 - RNA, 22 nt, Homo sapiens
  source 1..22: mol_type = genomic RNA
tggtggtttacaaagtaattca

SEQ ID NO: 3182 - RNA, 22 nt, Homo sapiens
  source 1..22: mol_type = genomic RNA
tggatttctttgtgaatcacca

SEQ ID NO: 3183 - RNA, 21 nt, Homo sapiens
  source 1..21: mol_type = genomic RNA
tcctcttctccctcctcccag

SEQ ID NO: 3184 - RNA, 20 nt, Homo sapiens
  source 1..20: mol_type = genomic RNA
gtagaggagatggcgcaggg

SEQ ID NO: 3185 - RNA, 22 nt, Homo sapiens
  source 1..22: mol_type = genomic RNA
aggcagcggggtgtagtggata

SEQ ID NO: 3186 - RNA, 22 nt, Homo sapiens
  source 1..22: mol_type = genomic RNA
tccattacactaccctgcctct

SEQ ID NO: 3187 - RNA, 22 nt, Homo sapiens
  source 1..22: mol_type = genomic RNA
gtgaacgggcgccatcccgagg

SEQ ID NO: 3188 - RNA, 22 nt, Homo sapiens
  source 1..22: mol_type = genomic RNA
gactgacacctctttgggtgaa

SEQ ID NO: 3189 - RNA, 21 nt, Homo sapiens
  source 1..21: mol_type = genomic RNA
tactcaaaaagctgtcagtca

SEQ ID NO: 3190 - RNA, 21 nt, Homo sapiens
  source 1..21: mol_type = genomic RNA
ttaatatcggacaaccattgt

SEQ ID NO: 3191 - RNA, 21 nt, Homo sapiens
  source 1..21: mol_type = genomic RNA
tacttggaaaggcatcagttg

SEQ ID NO: 3192 - RNA, 22 nt, Homo sapiens
  source 1..22: mol_type = genomic RNA
tgcaacgaacctgagccactga

SEQ ID NO: 3193 - RNA, 22 nt, Homo sapiens
  source 1..22: mol_type = genomic RNA
tgcaacttacctgagtcattga

SEQ ID NO: 3194 - RNA, 21 nt, Homo sapiens
  source 1..21: mol_type = genomic RNA
cactgtgtcctttctgcgtag

SEQ ID NO: 3195 - RNA, 22 nt, Homo sapiens
  source 1..22: mol_type = genomic RNA
cactggctcctttctgggtaga

SEQ ID NO: 3196 - RNA, 22 nt, Homo sapiens
  source 1..22: mol_type = genomic RNA
cactgtttcctttctgagtgga

SEQ ID NO: 3197 - RNA, 21 nt, Homo sapiens
  source 1..21: mol_type = genomic RNA
tattcagaaaggtgccagtca

SEQ ID NO: 3198 - RNA, 20 nt, Homo sapiens
  source 1..20: mol_type = genomic RNA
ggggagctgtggaagcagta

SEQ ID NO: 3199 - RNA, 25 nt, Homo sapiens
  source 1..25: mol_type = genomic RNA
ctagtgagggacagaaccaggattc

SEQ ID NO: 3200 - RNA, 23 nt, Homo sapiens
  source 1..23: mol_type = genomic RNA
gcagcagagaataggactacgtc

SEQ ID NO: 3201 - RNA, 20 nt, Homo sapiens
  source 1..20: mol_type = genomic RNA
agagtcttgtgatgtcttgc

SEQ ID NO: 3202 - RNA, 23 nt, Homo sapiens
  source 1..23: mol_type = genomic RNA
aggttgggatcggttgcaatgct

SEQ ID NO: 3203 - RNA, 22 nt, Homo sapiens
  source 1..22: mol_type = genomic RNA
gggtggggatttgttgcattac

SEQ ID NO: 3204 - RNA, 22 nt, Homo sapiens
  source 1..22: mol_type = genomic RNA
tattgcacttgtcccggcctgt

SEQ ID NO: 3205 - RNA, 22 nt, Homo sapiens
  source 1..22: mol_type = genomic RNA
tattgcactcgtcccggcctcc

SEQ ID NO: 3206 - RNA, 22 nt, Homo sapiens
  source 1..22: mol_type = genomic RNA
agggacgggacgcggtgcagtg

SEQ ID NO: 3207 - RNA, 22 nt, Homo sapiens
  source 1..22: mol_type = genomic RNA
tgtgcgcagggagacctctccc

SEQ ID NO: 3208 - RNA, 22 nt, Homo sapiens
  source 1..22: mol_type = genomic RNA
actgctgagctagcacttcccg

SEQ ID NO: 3209 - RNA, 22 nt, Homo sapiens
  source 1..22: mol_type = genomic RNA
tgtctactactggagacactgg

SEQ ID NO: 3210 - RNA, 23 nt, Homo sapiens
  source 1..23: mol_type = genomic RNA
ccagttaccgcttccgctaccgc

SEQ ID NO: 3211 - RNA, 23 nt, Homo sapiens
  source 1..23: mol_type = genomic RNA
caaagtgctgttcgtgcaggtag

SEQ ID NO: 3212 - RNA, 22 nt, Homo sapiens
  source 1..22: mol_type = genomic RNA
acagtagagggaggaatcgcag

SEQ ID NO: 3213 - RNA, 22 nt, Homo sapiens
  source 1..22: mol_type = genomic RNA
atccgcgctctgactctctgcc

SEQ ID NO: 3214 - RNA, 20 nt, Homo sapiens
  source 1..20: mol_type = genomic RNA
gtgagtcagggtggggctgg

SEQ ID NO: 3215 - RNA, 22 nt, Homo sapiens
  source 1..22: mol_type = genomic RNA
tgcccttaaaggtgaacccagt

SEQ ID NO: 3216 - RNA, 21 nt, Homo sapiens
  source 1..21: mol_type = genomic RNA
ccctgggcctctgctccccag

SEQ ID NO: 3217 - RNA, 24 nt, Homo sapiens
  source 1..24: mol_type = genomic RNA
tggggagctgaggctctgggggtg

SEQ ID NO: 3218 - RNA, 22 nt, Homo sapiens
  source 1..22: mol_type = genomic RNA
ataaagctagataaccgaaagt

SEQ ID NO: 3219 - RNA, 21 nt, Homo sapiens
  source 1..21: mol_type = genomic RNA
aaggcagggcccccgctcccc

SEQ ID NO: 3220 - RNA, 23 nt, Homo sapiens
  source 1..23: mol_type = genomic RNA
cacccggctgtgtgcacatgtgc

SEQ ID NO: 3221 - RNA, 22 nt, Homo sapiens
  source 1..22: mol_type = genomic RNA
tcttctctgttttggccatgtg

SEQ ID NO: 3222 - RNA, 21 nt, Homo sapiens
  source 1..21: mol_type = genomic RNA
ctgactgttgccgtcctccag

SEQ ID NO: 3223 - RNA, 22 nt, Homo sapiens
  source 1..22: mol_type = genomic RNA
aaattattgtacatcggatgag

SEQ ID NO: 3224 - RNA, 22 nt, Homo sapiens
  source 1..22: mol_type = genomic RNA
ttcaacgggtatttattgagca

SEQ ID NO: 3225 - RNA, 23 nt, Homo sapiens
  source 1..23: mol_type = genomic RNA
tctttggttatctagctgtatga

SEQ ID NO: 3226 - RNA, 22 nt, Homo sapiens
  source 1..22: mol_type = genomic RNA
aatcatgtgcagtgccaatatg

SEQ ID NO: 3227 - RNA, 23 nt, Homo sapiens
  source 1..23: mol_type = genomic RNA
tttggcactagcacatttttgct

SEQ ID NO: 3228 - RNA, 22 nt, Homo sapiens
  source 1..22: mol_type = genomic RNA
ctatacaacttactactttccc

SEQ ID NO: 3229 - RNA, 22 nt, Homo sapiens
  source 1..22: mol_type = genomic RNA
tgaggtagtaagttgtattgtt

SEQ ID NO: 3230 - RNA, 22 nt, Homo sapiens
  source 1..22: mol_type = genomic RNA
caagctcgcttctatgggtctg

SEQ ID NO: 3231 - RNA, 22 nt, Homo sapiens
  source 1..22: mol_type = genomic RNA
aacccgtagatccgatcttgtg

SEQ ID NO: 3232 - RNA, 22 nt, Homo sapiens
  source 1..22: mol_type = genomic RNA
caagctcgtgtctgtgggtccg

SEQ ID NO: 3233 - RNA, 22 nt, Homo sapiens
  source 1..22: mol_type = genomic RNA
cacccgtagaaccgaccttgcg

SEQ ID NO: 3234 - RNA, 22 nt, Homo sapiens
  source 1..22: mol_type = genomic RNA
ttaaacctctactaagttccca

SEQ ID NO: 3235 - RNA, 18 nt, Homo sapiens
  source 1..18: mol_type = genomic RNA
aaaacaacaccccccacc

SEQ ID NO: 3236 - RNA, 22 nt, Homo sapiens
  source 1..22: mol_type = genomic RNA
tacttgtaacggagagcactag

SEQ ID NO: 3237 - RNA, 22 nt, Homo sapiens
  source 1..22: mol_type = genomic RNA
ttagcctcatgaccagccacaa

SEQ ID NO: 3238 - RNA, 21 nt, Homo sapiens
  source 1..21: mol_type = genomic RNA
tgtgtctgatcatgagactaa

SEQ ID NO: 3239 - RNA, 22 nt, Homo sapiens
  source 1..22: mol_type = genomic RNA
ataatgaatgcttggtcccttg

SEQ ID NO: 3240 - RNA, 22 nt, Homo sapiens
  source 1..22: mol_type = genomic RNA
gcctgtccctaaatccttcctg

SEQ ID NO: 3241 - RNA, 22 nt, Homo sapiens
  source 1..22: mol_type = genomic RNA
gaatcacaaatgtccttaatag

SEQ ID NO: 3242 - RNA, 22 nt, Homo sapiens
  source 1..22: mol_type = genomic RNA
atcaatcacaaatgtccttaat

SEQ ID NO: 3243 - RNA, 17 nt, Homo sapiens
  source 1..17: mol_type = genomic RNA
ctcctcagctcagcctc

SEQ ID NO: 3244 - RNA, 22 nt, Homo sapiens
  source 1..22: mol_type = genomic RNA
ctgctccgagcacggccgcgcg

SEQ ID NO: 3245 - RNA, 22 nt, Homo sapiens
  source 1..22: mol_type = genomic RNA
atgggacatcctacatatgcaa

SEQ ID NO: 3246 - RNA, 21 nt, Homo sapiens
  source 1..21: mol_type = genomic RNA
taaagtaacttccacttggct

SEQ ID NO: 3247 - RNA, 17 nt, Homo sapiens
  source 1..17: mol_type = genomic RNA
aaccaccagcccactcc

SEQ ID NO: 3248 - RNA, 22 nt, Homo sapiens
  source 1..22: mol_type = genomic RNA
gagccccactgagaaatagaaa

SEQ ID NO: 3249 - RNA, 22 nt, Homo sapiens
  source 1..22: mol_type = genomic RNA
catttccatagcccactgggtt

SEQ ID NO: 3250 - RNA, 17 nt, Homo sapiens
  source 1..17: mol_type = genomic RNA
caacaacagaccacccc

SEQ ID NO: 3251 - RNA, 20 nt, Homo sapiens
  source 1..20: mol_type = genomic RNA
tggggcttctcccgcctttt

SEQ ID NO: 3252 - RNA, 20 nt, Homo sapiens
  source 1..20: mol_type = genomic RNA
ttagggtaccgcggccgtta

SEQ ID NO: 3253 - RNA, 17 nt, Homo sapiens
  source 1..17: mol_type = genomic RNA
tgccagcctcgcccagc

SEQ ID NO: 3254 - RNA, 19 nt, Homo sapiens
  source 1..19: mol_type = genomic RNA
ctgcccttcagccagctct

SEQ ID NO: 3255 - RNA, 18 nt, Homo sapiens
  source 1..18: mol_type = genomic RNA
cgccggagcccgccccct

SEQ ID NO: 3256 - RNA, 21 nt, Homo sapiens
  source 1..21: mol_type = genomic RNA
cgtcctgcatcactagcccca

SEQ ID NO: 3257 - RNA, 22 nt, Homo sapiens
  source 1..22: mol_type = genomic RNA
tatgcccaaatctcttaccaga

SEQ ID NO: 3258 - RNA, 22 nt, Homo sapiens
  source 1..22: mol_type = genomic RNA
tttggtcacaccagtccacatt

SEQ ID NO: 3259 - RNA, 17 nt, Homo sapiens
  source 1..17: mol_type = genomic RNA
ggcgcgcgcccagcccc

SEQ ID NO: 3260 - RNA, 21 nt, Homo sapiens
  source 1..21: mol_type = genomic RNA
acagagatggaaaggccttct

SEQ ID NO: 3261 - RNA, 22 nt, Homo sapiens
  source 1..22: mol_type = genomic RNA
cctctggtcagccacagtctgg

SEQ ID NO: 3262 - RNA, 21 nt, Homo sapiens
  source 1..21: mol_type = genomic RNA
agcaaaaagcctgtttacatt

SEQ ID NO: 3263 - RNA, 22 nt, Homo sapiens
  source 1..22: mol_type = genomic RNA
ccctctcagcttcagtttcctc

SEQ ID NO: 3264 - RNA, 17 nt, Homo sapiens
  source 1..17: mol_type = genomic RNA
gcccagccgtcccggag

SEQ ID NO: 3265 - RNA, 22 nt, Homo sapiens
  source 1..22: mol_type = genomic RNA
cagcacttgccctgccagccca

SEQ ID NO: 3266 - RNA, 17 nt, Homo sapiens
  source 1..17: mol_type = genomic RNA
tccctcctctcagtctt

SEQ ID NO: 3267 - RNA, 22 nt, Homo sapiens
  source 1..22: mol_type = genomic RNA
accagctaacaatacactgcca

SEQ ID NO: 3268 - RNA, 22 nt, Homo sapiens
  source 1..22: mol_type = genomic RNA
agtggcagggtagttgtggctg

SEQ ID NO: 3269 - RNA, 22 nt, Homo sapiens
  source 1..22: mol_type = genomic RNA
gccagctaacaatacactgcct

SEQ ID NO: 3270 - RNA, 23 nt, Homo sapiens
  source 1..23: mol_type = genomic RNA
acagagaggagtgcaactagcaa

SEQ ID NO: 3271 - RNA, 25 nt, Homo sapiens
  source 1..25: mol_type = genomic RNA
acagccgctagcaatacactgccta

SEQ ID NO: 3272 - RNA, 17 nt, Homo sapiens
  source 1..17: mol_type = genomic RNA
aagaaactactacctca

SEQ ID NO: 3273 - RNA, 21 nt, Homo sapiens
  source 1..21: mol_type = genomic RNA
tgattcatccgaggtcacata

SEQ ID NO: 3274 - RNA, 22 nt, Homo sapiens
  source 1..22: mol_type = genomic RNA
cttcagcaccatcatcatcagc

SEQ ID NO: 3275 - RNA, 22 nt, Homo sapiens
  source 1..22: mol_type = genomic RNA
taaattctatttcctgcttaaa

SEQ ID NO: 3276 - RNA, 22 nt, Homo sapiens
  source 1..22: mol_type = genomic RNA
catgttcatctctattgtcaca

SEQ ID NO: 3277 - RNA, 18 nt, Homo sapiens
  source 1..18: mol_type = genomic RNA
tccgtcccagcccagcct

SEQ ID NO: 3278 - RNA, 20 nt, Homo sapiens
  source 1..20: mol_type = genomic RNA
ttgcctcagaccacccattt

SEQ ID NO: 3279 - RNA, 20 nt, Homo sapiens
  source 1..20: mol_type = genomic RNA
cccagcccagcccaacccag

SEQ ID NO: 3280 - RNA, 17 nt, Homo sapiens
  source 1..17: mol_type = genomic RNA
cgcgcgcccagccccgc

SEQ ID NO: 3281 - RNA, 22 nt, Homo sapiens
  source 1..22: mol_type = genomic RNA
aaaaccttctatatcctttagt

SEQ ID NO: 3282 - RNA, 22 nt, Homo sapiens
  source 1..22: mol_type = genomic RNA
atgaatgcaaaatgtccccaat

SEQ ID NO: 3283 - RNA, 22 nt, Homo sapiens
  source 1..22: mol_type = genomic RNA
atattaggaacacatcgcaaaa

SEQ ID NO: 3284 - RNA, 22 nt, Homo sapiens
  source 1..22: mol_type = genomic RNA
tatggatgcaaaatgatcccaa

SEQ ID NO: 3285 - RNA, 22 nt, Homo sapiens
  source 1..22: mol_type = genomic RNA
tattcaggaacatattgcaaaa

SEQ ID NO: 3286 - RNA, 22 nt, Homo sapiens
  source 1..22: mol_type = genomic RNA
aaccatacatcctactccctca

SEQ ID NO: 3287 - RNA, 22 nt, Homo sapiens
  source 1..22: mol_type = genomic RNA
agggcaaatgcaacagttcttc

SEQ ID NO: 3288 - RNA, 22 nt, Homo sapiens
  source 1..22: mol_type = genomic RNA
tgggcgatacagtgaggccctg

SEQ ID NO: 3289 - RNA, 22 nt, Homo sapiens
  source 1..22: mol_type = genomic RNA
atgggcctccagccgtcagtct

SEQ ID NO: 3290 - RNA, 18 nt, Homo sapiens
  source 1..18: mol_type = genomic RNA
ttccccaatcctgcctgt

SEQ ID NO: 3291 - RNA, 22 nt, Homo sapiens
  source 1..22: mol_type = genomic RNA
gggctgccgggagtccagtcct

SEQ ID NO: 3292 - RNA, 17 nt, Homo sapiens
  source 1..17: mol_type = genomic RNA
gccccgacccttctccc

SEQ ID NO: 3293 - RNA, 25 nt, Homo sapiens
  source 1..25: mol_type = genomic RNA
ctcagctgtgagtttcatcatattt

SEQ ID NO: 3294 - RNA, 26 nt, Homo sapiens
  source 1..26: mol_type = genomic RNA
tctcagcacagttatcatccctgagc

SEQ ID NO: 3295 - RNA, 18 nt, Homo sapiens
  source 1..18: mol_type = genomic RNA
cagccctgcgcactgctg

SEQ ID NO: 3296 - RNA, 22 nt, Homo sapiens
  source 1..22: mol_type = genomic RNA
aactcagtaatggtaacggttt

SEQ ID NO: 3297 - RNA, 22 nt, Homo sapiens
  source 1..22: mol_type = genomic RNA
aatggtaatggttctcttgcta

SEQ ID NO: 3298 - RNA, 22 nt, Homo sapiens
  source 1..22: mol_type = genomic RNA
ttcctgcgtgttttctgtccaa

SEQ ID NO: 3299 - RNA, 20 nt, Homo sapiens
  source 1..20: mol_type = genomic RNA
ttggacagaaaacacgcagg

SEQ ID NO: 3300 - RNA, 22 nt, Homo sapiens
  source 1..22: mol_type = genomic RNA
acctgcgtgttttctgtccaaa

SEQ ID NO: 3301 - RNA, 20 nt, Homo sapiens
  source 1..20: mol_type = genomic RNA
ttggacagaaaacacgcagg

SEQ ID NO: 3302 - RNA, 22 nt, Homo sapiens
  source 1..22: mol_type = genomic RNA
ctgagcacaggacttccttagc

SEQ ID NO: 3303 - RNA, 21 nt, Homo sapiens
  source 1..21: mol_type = genomic RNA
accggcctacaggcagagtca

SEQ ID NO: 3304 - RNA, 21 nt, Homo sapiens
  source 1..21: mol_type = genomic RNA
acagccgaggccctctcggtc

SEQ ID NO: 3305 - RNA, 22 nt, Homo sapiens
  source 1..22: mol_type = genomic RNA
cacttacttctttgcagatgag

SEQ ID NO: 3306 - RNA, 22 nt, Homo sapiens
  source 1..22: mol_type = genomic RNA
atagcagcataagcctgtctca

SEQ ID NO: 3307 - RNA, 22 nt, Homo sapiens
  source 1..22: mol_type = genomic RNA
tgagacaggttcatgctgctat

SEQ ID NO: 3308 - RNA, 20 nt, Homo sapiens
  source 1..20: mol_type = genomic RNA
tagcagcatgaacctgtctc

SEQ ID NO: 3309 - RNA, 21 nt, Homo sapiens
  source 1..21: mol_type = genomic RNA
gagacaggcttatgctgctat

SEQ ID NO: 3310 - RNA, 21 nt, Homo sapiens
  source 1..21: mol_type = genomic RNA
aaccagcatgcacatcccccc

SEQ ID NO: 3311 - RNA, 22 nt, Homo sapiens
  source 1..22: mol_type = genomic RNA
tcagtttcctctgcaaacagtt

SEQ ID NO: 3312 - RNA, 22 nt, Homo sapiens
  source 1..22: mol_type = genomic RNA
agcggccagccctgctgtcagc

SEQ ID NO: 3313 - RNA, 22 nt, Homo sapiens
  source 1..22: mol_type = genomic RNA
acagtcatctctttgcagacca

SEQ ID NO: 3314 - RNA, 22 nt, Homo sapiens
  source 1..22: mol_type = genomic RNA
gtccagatcatacatataatga

SEQ ID NO: 3315 - RNA, 21 nt, Homo sapiens
  source 1..21: mol_type = genomic RNA
acgggccatcagcagtccaat

SEQ ID NO: 3316 - RNA, 22 nt, Homo sapiens
  source 1..22: mol_type = genomic RNA
ttcattggactgctgatggcct

SEQ ID NO: 3317 - RNA, 18 nt, Homo sapiens
  source 1..18: mol_type = genomic RNA
cgctcccgtcctgctggg

SEQ ID NO: 3318 - RNA, 17 nt, Homo sapiens
  source 1..17: mol_type = genomic RNA
tcagaagccttctccat

SEQ ID NO: 3319 - RNA, 17 nt, Homo sapiens
  source 1..17: mol_type = genomic RNA
cgccgggctccccgggg

SEQ ID NO: 3320 - RNA, 22 nt, Homo sapiens
  source 1..22: mol_type = genomic RNA
agcgtccggcaacctccttcca

SEQ ID NO: 3321 - RNA, 17 nt, Homo sapiens
  source 1..17: mol_type = genomic RNA
agacccctcctccatcc

SEQ ID NO: 3322 - RNA, 17 nt, Homo sapiens
  source 1..17: mol_type = genomic RNA
gtcccagccaggtccac

SEQ ID NO: 3323 - RNA, 21 nt, Homo sapiens
  source 1..21: mol_type = genomic RNA
atgtggtagatatatgcacga

SEQ ID NO: 3324 - RNA, 21 nt, Homo sapiens
  source 1..21: mol_type = genomic RNA
atcgtgcatatatctaccaca

SEQ ID NO: 3325 - RNA, 22 nt, Homo sapiens
  source 1..22: mol_type = genomic RNA
cagctaagctcagctcggctca

SEQ ID NO: 3326 - RNA, 22 nt, Homo sapiens
  source 1..22: mol_type = genomic RNA
tcagcccagctcatccaagctc

SEQ ID NO: 3327 - RNA, 22 nt, Homo sapiens
  source 1..22: mol_type = genomic RNA
gcccagctcagcccagttcagc

SEQ ID NO: 3328 - RNA, 21 nt, Homo sapiens
  source 1..21: mol_type = genomic RNA
taaacctacaggcaggactaa

SEQ ID NO: 3329 - RNA, 23 nt, Homo sapiens
  source 1..23: mol_type = genomic RNA
accctataagcaatattgcacta

SEQ ID NO: 3330 - RNA, 22 nt, Homo sapiens
  source 1..22: mol_type = genomic RNA
gcagagacaatattgatagggt

SEQ ID NO: 3331 - RNA, 21 nt, Homo sapiens
  source 1..21: mol_type = genomic RNA
gtgtatatgcccatggactgc

SEQ ID NO: 3332 - RNA, 22 nt, Homo sapiens
  source 1..22: mol_type = genomic RNA
cgatgtagtccaaaggcacata

SEQ ID NO: 3333 - RNA, 22 nt, Homo sapiens
  source 1..22: mol_type = genomic RNA
ctagagcagcgagagggcggca

SEQ ID NO: 3334 - RNA, 23 nt, Homo sapiens
  source 1..23: mol_type = genomic RNA
tccgccacacccacgctgccctc

SEQ ID NO: 3335 - RNA, 22 nt, Homo sapiens
  source 1..22: mol_type = genomic RNA
tgcatatgcctggctagctcct

SEQ ID NO: 3336 - RNA, 20 nt, Homo sapiens
  source 1..20: mol_type = genomic RNA
gaggagctagccaggcatat

SEQ ID NO: 3337 - RNA, 19 nt, Homo sapiens
  source 1..19: mol_type = genomic RNA
ccccgggccggtcgcgccg

SEQ ID NO: 3338 - RNA, 21 nt, Homo sapiens
  source 1..21: mol_type = genomic RNA
ttgcgggttctgacttcaaga

SEQ ID NO: 3339 - RNA, 22 nt, Homo sapiens
  source 1..22: mol_type = genomic RNA
ctaaaggctttgaacacgagtt

SEQ ID NO: 3340 - RNA, 22 nt, Homo sapiens
  source 1..22: mol_type = genomic RNA
tcacttgaatctgcagttagta

SEQ ID NO: 3341 - RNA, 23 nt, Homo sapiens
  source 1..23: mol_type = genomic RNA
cggccggctgagcggtgtccagg

SEQ ID NO: 3342 - RNA, 21 nt, Homo sapiens
  source 1..21: mol_type = genomic RNA
acttgtccaccgcagccgagt

SEQ ID NO: 3343 - RNA, 20 nt, Homo sapiens
  source 1..20: mol_type = genomic RNA
gcaaagcaaggtgagagtga

SEQ ID NO: 3344 - RNA, 22 nt, Homo sapiens
  source 1..22: mol_type = genomic RNA
tcaatctcagcctacttagcaa

SEQ ID NO: 3345 - RNA, 22 nt, Homo sapiens
  source 1..22: mol_type = genomic RNA
gtgggccaggaaacagggggtg

SEQ ID NO: 3346 - RNA, 23 nt, Homo sapiens
  source 1..23: mol_type = genomic RNA
cccaccagctgctccctggccca

SEQ ID NO: 3347 - RNA, 24 nt, Homo sapiens
  source 1..24: mol_type = genomic RNA
tgaggcaaaagtatggcatgggca

SEQ ID NO: 3348 - RNA, 22 nt, Homo sapiens
  source 1..22: mol_type = genomic RNA
agccaccaggggacgatgccat

SEQ ID NO: 3349 - RNA, 22 nt, Homo sapiens
  source 1..22: mol_type = genomic RNA
ttagcatttatggtcatgtgtc

SEQ ID NO: 3350 - RNA, 23 nt, Homo sapiens
  source 1..23: mol_type = genomic RNA
cttctgtctcttttctctctcca

SEQ ID NO: 3351 - RNA, 22 nt, Homo sapiens
  source 1..22: mol_type = genomic RNA
aaccaggcaagaactactgtct

SEQ ID NO: 3352 - RNA, 19 nt, Homo sapiens
  source 1..19: mol_type = genomic RNA
acaatatttcttgcctggt

SEQ ID NO: 3353 - RNA, 21 nt, Homo sapiens
  source 1..21: mol_type = genomic RNA
ctgggaagggagagggacaat

SEQ ID NO: 3354 - RNA, 22 nt, Homo sapiens
  source 1..22: mol_type = genomic RNA
tccctcagctcctcttcccagt

SEQ ID NO: 3355 - RNA, 23 nt, Homo sapiens
  source 1..23: mol_type = genomic RNA
ttcctcagcacagcaccatcttc

SEQ ID NO: 3356 - RNA, 20 nt, Homo sapiens
  source 1..20: mol_type = genomic RNA
ctcccatttgcagtcccaca

SEQ ID NO: 3357 - RNA, 21 nt, Homo sapiens
  source 1..21: mol_type = genomic RNA
tggggagaggcaggcctcaga

SEQ ID NO: 3358 - RNA, 24 nt, Homo sapiens
  source 1..24: mol_type = genomic RNA
ctctgagagcccacccctcgccca

SEQ ID NO: 3359 - RNA, 21 nt, Homo sapiens
  source 1..21: mol_type = genomic RNA
atgtcaggcctcattctacct

SEQ ID NO: 3360 - RNA, 19 nt, Homo sapiens
  source 1..19: mol_type = genomic RNA
aaggtagaaagaggcctga

SEQ ID NO: 3361 - RNA, 20 nt, Homo sapiens
  source 1..20: mol_type = genomic RNA
gcccgacctcacccaccccg

SEQ ID NO: 3362 - RNA, 22 nt, Homo sapiens
  source 1..22: mol_type = genomic RNA
tgaggggatgggttaacagaac

SEQ ID NO: 3363 - RNA, 22 nt, Homo sapiens
  source 1..22: mol_type = genomic RNA
tagttctattaaccagtcccct

SEQ ID NO: 3364 - RNA, 23 nt, Homo sapiens
  source 1..23: mol_type = genomic RNA
tctccaagcaacccttaactcca

SEQ ID NO: 3365 - RNA, 22 nt, Homo sapiens
  source 1..22: mol_type = genomic RNA
ggtgttaagccttgctcagaga

SEQ ID NO: 3366 - RNA, 22 nt, Homo sapiens
  source 1..22: mol_type = genomic RNA
ccagatgcctccagatcccaca

SEQ ID NO: 3367 - RNA, 21 nt, Homo sapiens
  source 1..21: mol_type = genomic RNA
ccccggggacctgacgagggt

SEQ ID NO: 3368 - RNA, 22 nt, Homo sapiens
  source 1..22: mol_type = genomic RNA
cgaccctctgccatccccggtg

SEQ ID NO: 3369 - RNA, 23 nt, Homo sapiens
  source 1..23: mol_type = genomic RNA
acaggcctcctgccctcagccca

SEQ ID NO: 3370 - RNA, 23 nt, Homo sapiens
  source 1..23: mol_type = genomic RNA
atgcctcagaccacttccacatt

SEQ ID NO: 3371 - RNA, 23 nt, Homo sapiens
  source 1..23: mol_type = genomic RNA
attcctccaggatccacactcac

SEQ ID NO: 3372 - RNA, 22 nt, Homo sapiens
  source 1..22: mol_type = genomic RNA
cgttgccatgtctaagaagaaa

SEQ ID NO: 3373 - RNA, 22 nt, Homo sapiens
  source 1..22: mol_type = genomic RNA
gttttcttcttagacatggcag

SEQ ID NO: 3374 - RNA, 22 nt, Homo sapiens
  source 1..22: mol_type = genomic RNA
agctgccatgtctaagaagaaa

SEQ ID NO: 3375 - RNA, 19 nt, Homo sapiens
  source 1..19: mol_type = genomic RNA
ttcttcttagacatggcaa

SEQ ID NO: 3376 - RNA, 23 nt, Homo sapiens
  source 1..23: mol_type = genomic RNA
atgtgtgttgcgtgtatgtgtat

SEQ ID NO: 3377 - RNA, 23 nt, Homo sapiens
  source 1..23: mol_type = genomic RNA
ctccattttccaccagagctgca

SEQ ID NO: 3378 - RNA, 22 nt, Homo sapiens
  source 1..22: mol_type = genomic RNA
tggactagctctgtggatcctg

SEQ ID NO: 3379 - RNA, 22 nt, Homo sapiens
  source 1..22: mol_type = genomic RNA
gtcaggatccacagagctagtt

SEQ ID NO: 3380 - RNA, 22 nt, Homo sapiens
  source 1..22: mol_type = genomic RNA
atttagccaattgtctatcttt

SEQ ID NO: 3381 - RNA, 22 nt, Homo sapiens
  source 1..22: mol_type = genomic RNA
ctaaagatggacaattggctaa

SEQ ID NO: 3382 - RNA, 22 nt, Homo sapiens
  source 1..22: mol_type = genomic RNA
atttagccaattgtccatcttt

SEQ ID NO: 3383 - RNA, 24 nt, Homo sapiens
  source 1..24: mol_type = genomic RNA
actgcacgtccatggagctcagct

SEQ ID NO: 3384 - RNA, 22 nt, Homo sapiens
  source 1..22: mol_type = genomic RNA
gacggggctcacagaccggaag

SEQ ID NO: 3385 - RNA, 22 nt, Homo sapiens
  source 1..22: mol_type = genomic RNA
aacttgcggagtgggcacccca

SEQ ID NO: 3386 - RNA, 26 nt, Homo sapiens
  source 1..26: mol_type = genomic RNA
ggcgggggctacgcgccgcggccgag

SEQ ID NO: 3387 - RNA, 23 nt, Homo sapiens
  source 1..23: mol_type = genomic RNA
gctcgcgctcacgcgtcccccag

SEQ ID NO: 3388 - RNA, 21 nt, Homo sapiens
  source 1..21: mol_type = genomic RNA
aaatacatgtcagattgtatg

SEQ ID NO: 3389 - RNA, 21 nt, Homo sapiens
  source 1..21: mol_type = genomic RNA
ggcatacaatctgacatgtat

SEQ ID NO: 3390 - RNA, 23 nt, Homo sapiens
  source 1..23: mol_type = genomic RNA
gggaattacaatctgacatgcaa

SEQ ID NO: 3391 - RNA, 21 nt, Homo sapiens
  source 1..21: mol_type = genomic RNA
ctgtggggacagaaggaggga

SEQ ID NO: 3392 - RNA, 22 nt, Homo sapiens
  source 1..22: mol_type = genomic RNA
ggttctccttctgctccccagt

SEQ ID NO: 3393 - RNA, 23 nt, Homo sapiens
  source 1..23: mol_type = genomic RNA
ctggaaaaacaaaaaggattttc

SEQ ID NO: 3394 - RNA, 23 nt, Homo sapiens
  source 1..23: mol_type = genomic RNA
gacaaatccttttttttttccct

SEQ ID NO: 3395 - RNA, 22 nt, Homo sapiens
  source 1..22: mol_type = genomic RNA
cctcctccacttcccggacaca

SEQ ID NO: 3396 - RNA, 22 nt, Homo sapiens
  source 1..22: mol_type = genomic RNA
aagcgaccatgatgtaacttca

SEQ ID NO: 3397 - RNA, 22 nt, Homo sapiens
  source 1..22: mol_type = genomic RNA
tgaagttacatcatggtcgctt

SEQ ID NO: 3398 - RNA, 21 nt, Homo sapiens
  source 1..21: mol_type = genomic RNA
agaccaaagactatgcactaa

SEQ ID NO: 3399 - RNA, 22 nt, Homo sapiens
  source 1..22: mol_type = genomic RNA
agattagcgcacagtcttcggt

SEQ ID NO: 3400 - RNA, 21 nt, Homo sapiens
  source 1..21: mol_type = genomic RNA
tgcctctgtccagctgtgtaa

SEQ ID NO: 3401 - RNA, 22 nt, Homo sapiens
  source 1..22: mol_type = genomic RNA
tccagtccggctcctgcctgga

SEQ ID NO: 3402 - RNA, 21 nt, Homo sapiens
  source 1..21: mol_type = genomic RNA
agccgcgcgtcccgagcccag

SEQ ID NO: 3403 - RNA, 22 nt, Homo sapiens
  source 1..22: mol_type = genomic RNA
cctgctggtcaatcacagcccc

SEQ ID NO: 3404 - RNA, 22 nt, Homo sapiens
  source 1..22: mol_type = genomic RNA
aagagccagtggtgaaacagtg

SEQ ID NO: 3405 - RNA, 21 nt, Homo sapiens
  source 1..21: mol_type = genomic RNA
tcactgtctcaccactggctc

SEQ ID NO: 3406 - RNA, 22 nt, Homo sapiens
  source 1..22: mol_type = genomic RNA
agtagttctttggtctcacaga

SEQ ID NO: 3407 - RNA, 22 nt, Homo sapiens
  source 1..22: mol_type = genomic RNA
tggctgaaagaccaaagaacaa

SEQ ID NO: 3408 - RNA, 22 nt, Homo sapiens
  source 1..22: mol_type = genomic RNA
tcataagtctgaacaatacctt

SEQ ID NO: 3409 - RNA, 22 nt, Homo sapiens
  source 1..22: mol_type = genomic RNA
agcaaagaatctctatcacaga

SEQ ID NO: 3410 - RNA, 21 nt, Homo sapiens
  source 1..21: mol_type = genomic RNA
taacaactcttacaattcaga

SEQ ID NO: 3411 - RNA, 23 nt, Homo sapiens
  source 1..23: mol_type = genomic RNA
acatctaagactgcaagagttct

SEQ ID NO: 3412 - RNA, 22 nt, Homo sapiens
  source 1..22: mol_type = genomic RNA
agatacagcctgcattcccgtt

SEQ ID NO: 3413 - RNA, 23 nt, Homo sapiens
  source 1..23: mol_type = genomic RNA
agaccaggctccaggaactcaga

SEQ ID NO: 3414 - RNA, 23 nt, Homo sapiens
  source 1..23: mol_type = genomic RNA
atcgggcgagcactggatctcca

SEQ ID NO: 3415 - RNA, 22 nt, Homo sapiens
  source 1..22: mol_type = genomic RNA
acgtctccaccgacttgcaaca

SEQ ID NO: 3416 - RNA, 22 nt, Homo sapiens
  source 1..22: mol_type = genomic RNA
tatgttgcaagtcagtagagag

SEQ ID NO: 3417 - RNA, 22 nt, Homo sapiens
  source 1..22: mol_type = genomic RNA
ctagccagggcaggaagggaga

SEQ ID NO: 3418 - RNA, 26 nt, Homo sapiens
  source 1..26: mol_type = genomic RNA
aaccttgccccactccaagccctggg

SEQ ID NO: 3419 - RNA, 23 nt, Homo sapiens
  source 1..23: mol_type = genomic RNA
aacaccagaaagcccagcagata

SEQ ID NO: 3420 - RNA, 21 nt, Homo sapiens
  source 1..21: mol_type = genomic RNA
gcctgccccctccaacagcca

SEQ ID NO: 3421 - RNA, 22 nt, Homo sapiens
  source 1..22: mol_type = genomic RNA
tttgggtgcgggaggagggctg

SEQ ID NO: 3422 - RNA, 22 nt, Homo sapiens
  source 1..22: mol_type = genomic RNA
cccaggtcctctgctgccccta

SEQ ID NO: 3423 - RNA, 22 nt, Homo sapiens
  source 1..22: mol_type = genomic RNA
ggcccccaccatgtctcctcaa

SEQ ID NO: 3424 - RNA, 21 nt, Homo sapiens
  source 1..21: mol_type = genomic RNA
cagaggcctcagctgggctgc

SEQ ID NO: 3425 - RNA, 22 nt, Homo sapiens
  source 1..22: mol_type = genomic RNA
ttcagcccagcctcgcctgctc

SEQ ID NO: 3426 - RNA, 23 nt, Homo sapiens
  source 1..23: mol_type = genomic RNA
atgcactctcagtccgtggctgg

SEQ ID NO: 3427 - RNA, 23 nt, Homo sapiens
  source 1..23: mol_type = genomic RNA
ccgcagctcatggcctggaggac

SEQ ID NO: 3428 - RNA, 22 nt, Homo sapiens
  source 1..22: mol_type = genomic RNA
atctgatacccacactgcctga

SEQ ID NO: 3429 - RNA, 23 nt, Homo sapiens
  source 1..23: mol_type = genomic RNA
aaatactgtgaattccactctca

SEQ ID NO: 3430 - RNA, 23 nt, Homo sapiens
  source 1..23: mol_type = genomic RNA
tgtgacagtgaaattcacagtat

SEQ ID NO: 3431 - RNA, 21 nt, Homo sapiens
  source 1..21: mol_type = genomic RNA
aggtgttatcctgtccatttg

SEQ ID NO: 3432 - RNA, 22 nt, Homo sapiens
  source 1..22: mol_type = genomic RNA
gcaaatggataggataacacct

SEQ ID NO: 3433 - RNA, 22 nt, Homo sapiens
  source 1..22: mol_type = genomic RNA
gaaggaggcagcggtgagatca

SEQ ID NO: 3434 - RNA, 22 nt, Homo sapiens
  source 1..22: mol_type = genomic RNA
cctgctcgcccactgcctcctg

SEQ ID NO: 3435 - RNA, 22 nt, Homo sapiens
  source 1..22: mol_type = genomic RNA
agatgacagtatccgtcttgca

SEQ ID NO: 3436 - RNA, 24 nt, Homo sapiens
  source 1..24: mol_type = genomic RNA
accaaggggcaggagtcactgaca

SEQ ID NO: 3437 - RNA, 22 nt, Homo sapiens
  source 1..22: mol_type = genomic RNA
cacgtcagtgactgcgccccct

SEQ ID NO: 3438 - RNA, 23 nt, Homo sapiens
  source 1..23: mol_type = genomic RNA
tggggtcttcctctacattttga

SEQ ID NO: 3439 - RNA, 22 nt, Homo sapiens
  source 1..22: mol_type = genomic RNA
ggagaagattgcagagtaaatt

SEQ ID NO: 3440 - RNA, 22 nt, Homo sapiens
  source 1..22: mol_type = genomic RNA
ggaacttactctgcaatcttct

SEQ ID NO: 3441 - RNA, 26 nt, Homo sapiens
  source 1..26: mol_type = genomic RNA
cactggggtgaggagtcagtcctgtg

SEQ ID NO: 3442 - RNA, 22 nt, Homo sapiens
  source 1..22: mol_type = genomic RNA
acacactgtcctcatccccaga

SEQ ID NO: 3443 - RNA, 20 nt, Homo sapiens
  source 1..20: mol_type = genomic RNA
acaccacacccatcacccat

SEQ ID NO: 3444 - RNA, 22 nt, Homo sapiens
  source 1..22: mol_type = genomic RNA
aaggggtaggtgtggtggccaa

SEQ ID NO: 3445 - RNA, 22 nt, Homo sapiens
  source 1..22: mol_type = genomic RNA
gtggcaatacaatacaactaca

SEQ ID NO: 3446 - RNA, 23 nt, Homo sapiens
  source 1..23: mol_type = genomic RNA
actatatttgtactgtattgcta

SEQ ID NO: 3447 - RNA, 22 nt, Homo sapiens
  source 1..22: mol_type = genomic RNA
tagacactagatatgtgactga

SEQ ID NO: 3448 - RNA, 22 nt, Homo sapiens
  source 1..22: mol_type = genomic RNA
aatcactcacatgcctagtgtc

SEQ ID NO: 3449 - RNA, 22 nt, Homo sapiens
  source 1..22: mol_type = genomic RNA
acagcaattaccaagtgattga

SEQ ID NO: 3450 - RNA, 25 nt, Homo sapiens
  source 1..25: mol_type = genomic RNA
aagcagcgcccacttcctccccgct

SEQ ID NO: 3451 - RNA, 22 nt, Homo sapiens
  source 1..22: mol_type = genomic RNA
agaacctcggctggggcgggct

SEQ ID NO: 3452 - RNA, 23 nt, Homo sapiens
  source 1..23: mol_type = genomic RNA
ccagaacccgcccgcgccggggc

SEQ ID NO: 3453 - RNA, 22 nt, Homo sapiens
  source 1..22: mol_type = genomic RNA
atcagagagatgccgccttgct

SEQ ID NO: 3454 - RNA, 21 nt, Homo sapiens
  source 1..21: mol_type = genomic RNA
aaggagcaaggcggcatctct

SEQ ID NO: 3455 - RNA, 23 nt, Homo sapiens
  source 1..23: mol_type = genomic RNA
gctacagagcacctcctcttcaa

SEQ ID NO: 3456 - RNA, 22 nt, Homo sapiens
  source 1..22: mol_type = genomic RNA
ttggagagcaagtcactgttgt

SEQ ID NO: 3457 - RNA, 18 nt, Homo sapiens
  source 1..18: mol_type = genomic RNA
aaccacctgccctcaccc

SEQ ID NO: 3458 - RNA, 18 nt, Homo sapiens
  source 1..18: mol_type = genomic RNA
atcaagccagaagacacg

SEQ ID NO: 3459 - RNA, 23 nt, Homo sapiens
  source 1..23: mol_type = genomic RNA
ctcatgtcttctggcctgatgca

SEQ ID NO: 3460 - RNA, 21 nt, Homo sapiens
  source 1..21: mol_type = genomic RNA
atacagtacaggtctctcatt

SEQ ID NO: 3461 - RNA, 22 nt, Homo sapiens
  source 1..22: mol_type = genomic RNA
gaaatgagagacctgtactgga

SEQ ID NO: 3462 - RNA, 22 nt, Homo sapiens
  source 1..22: mol_type = genomic RNA
ttctcccactgtctggatccca

SEQ ID NO: 3463 - RNA, 22 nt, Homo sapiens
  source 1..22: mol_type = genomic RNA
tgggagcctggtagtgggagaa

SEQ ID NO: 3464 - RNA, 22 nt, Homo sapiens
  source 1..22: mol_type = genomic RNA
caactctgaccacctaggttgg

SEQ ID NO: 3465 - RNA, 22 nt, Homo sapiens
  source 1..22: mol_type = genomic RNA
atcaacctaaggggtcagagtt

SEQ ID NO: 3466 - RNA, 23 nt, Homo sapiens
  source 1..23: mol_type = genomic RNA
attggctgcagttaaggtggcac

SEQ ID NO: 3467 - RNA, 22 nt, Homo sapiens
  source 1..22: mol_type = genomic RNA
ccaccttaactgcagccaactt

SEQ ID NO: 3468 - RNA, 22 nt, Homo sapiens
  source 1..22: mol_type = genomic RNA
tctccatgtttccttccccctt

SEQ ID NO: 3469 - RNA, 22 nt, Homo sapiens
  source 1..22: mol_type = genomic RNA
agaagggggaaggaaacatgga

SEQ ID NO: 3470 - RNA, 21 nt, Homo sapiens
  source 1..21: mol_type = genomic RNA
aggccacagccacccatgtgt

SEQ ID NO: 3471 - RNA, 22 nt, Homo sapiens
  source 1..22: mol_type = genomic RNA
acacatgggtggctgtggccta

SEQ ID NO: 3472 - RNA, 21 nt, Homo sapiens
  source 1..21: mol_type = genomic RNA
tgcttggtttcaggtacagct

SEQ ID NO: 3473 - RNA, 22 nt, Homo sapiens
  source 1..22: mol_type = genomic RNA
cctgcatattatagatttgtga

SEQ ID NO: 3474 - RNA, 21 nt, Homo sapiens
  source 1..21: mol_type = genomic RNA
atacttggtacaacttaagca

SEQ ID NO: 3475 - RNA, 22 nt, Homo sapiens
  source 1..22: mol_type = genomic RNA
aagttataccaaatatgccagg

SEQ ID NO: 3476 - RNA, 22 nt, Homo sapiens
  source 1..22: mol_type = genomic RNA
ccaccgtcacctggagccctca

SEQ ID NO: 3477 - RNA, 22 nt, Homo sapiens
  source 1..22: mol_type = genomic RNA
ctgcagggaggtgctggcaggt

SEQ ID NO: 3478 - RNA, 23 nt, Homo sapiens
  source 1..23: mol_type = genomic RNA
caacctggcacagccctcctgcc

SEQ ID NO: 3479 - RNA, 22 nt, Homo sapiens
  source 1..22: mol_type = genomic RNA
tttggggaggagccagagaggg

SEQ ID NO: 3480 - RNA, 24 nt, Homo sapiens
  source 1..24: mol_type = genomic RNA
tgctcttatctcatggctccccca

SEQ ID NO: 3481 - RNA, 21 nt, Homo sapiens
  source 1..21: mol_type = genomic RNA
actagctgaaccagaaggtac

SEQ ID NO: 3482 - RNA, 23 nt, Homo sapiens
  source 1..23: mol_type = genomic RNA
cgaagctcactcctggttcagtt

SEQ ID NO: 3483 - RNA, 22 nt, Homo sapiens
  source 1..22: mol_type = genomic RNA
cccgacactgacgccttcccca

SEQ ID NO: 3484 - RNA, 21 nt, Homo sapiens
  source 1..21: mol_type = genomic RNA
ggtgggaaggctgcagggtct

SEQ ID NO: 3485 - RNA, 22 nt, Homo sapiens
  source 1..22: mol_type = genomic RNA
tgcggccagagggaacctgggt

SEQ ID NO: 3486 - RNA, 23 nt, Homo sapiens
  source 1..23: mol_type = genomic RNA
ccactccaggctcctctggccct

SEQ ID NO: 3487 - RNA, 22 nt, Homo sapiens
  source 1..22: mol_type = genomic RNA
gaatctgccagcttcccactat

SEQ ID NO: 3488 - RNA, 21 nt, Homo sapiens
  source 1..21: mol_type = genomic RNA
ccactgtggaagctggcagat

SEQ ID NO: 3489 - RNA, 25 nt, Homo sapiens
  source 1..25: mol_type = genomic RNA
ctggggcaggagggaggtcagcatg

SEQ ID NO: 3490 - RNA, 23 nt, Homo sapiens
  source 1..23: mol_type = genomic RNA
tgcttgctgcctctcccctccca

SEQ ID NO: 3491 - RNA, 22 nt, Homo sapiens
  source 1..22: mol_type = genomic RNA
tagcttcccaacagataaatga

SEQ ID NO: 3492 - RNA, 23 nt, Homo sapiens
  source 1..23: mol_type = genomic RNA
tggcatggaatgggctccgccag

SEQ ID NO: 3493 - RNA, 22 nt, Homo sapiens
  source 1..22: mol_type = genomic RNA
agtgttgggggccacttgtgtg

SEQ ID NO: 3494 - RNA, 22 nt, Homo sapiens
  source 1..22: mol_type = genomic RNA
cacactcatgtggcccccagca

SEQ ID NO: 3495 - RNA, 21 nt, Homo sapiens
  source 1..21: mol_type = genomic RNA
cagaacaggacaggtcagggc

SEQ ID NO: 3496 - RNA, 23 nt, Homo sapiens
  source 1..23: mol_type = genomic RNA
agcttcctgctccctgctctaca

SEQ ID NO: 3497 - RNA, 22 nt, Homo sapiens
  source 1..22: mol_type = genomic RNA
atcccaatgctagacctggtgg

SEQ ID NO: 3498 - RNA, 22 nt, Homo sapiens
  source 1..22: mol_type = genomic RNA
caccgggtctagcattgggatt

SEQ ID NO: 3499 - RNA, 22 nt, Homo sapiens
  source 1..22: mol_type = genomic RNA
cgccctgaccgcagcccgcagc

SEQ ID NO: 3500 - RNA, 21 nt, Homo sapiens
  source 1..21: mol_type = genomic RNA
atgtctaatttgagcaccttt

SEQ ID NO: 3501 - RNA, 22 nt, Homo sapiens
  source 1..22: mol_type = genomic RNA
taccgaaggtgttcaaattagg

SEQ ID NO: 3502 - RNA, 19 nt, Homo sapiens
  source 1..19: mol_type = genomic RNA
cagcccagataacctgcct

SEQ ID NO: 3503 - RNA, 20 nt, Homo sapiens
  source 1..20: mol_type = genomic RNA
cactgtcagcatcctcgcat

SEQ ID NO: 3504 - RNA, 22 nt, Homo sapiens
  source 1..22: mol_type = genomic RNA
tcctccaggcgctccagtttca

SEQ ID NO: 3505 - RNA, 22 nt, Homo sapiens
  source 1..22: mol_type = genomic RNA
atgaaactgaaaacgcgctggt

SEQ ID NO: 3506 - RNA, 25 nt, Homo sapiens
  source 1..25: mol_type = genomic RNA
agggcccctccgctcctcctccctt

SEQ ID NO: 3507 - RNA, 22 nt, Homo sapiens
  source 1..22: mol_type = genomic RNA
gcagggacggatcctctcgggc

SEQ ID NO: 3508 - RNA, 22 nt, Homo sapiens
  source 1..22: mol_type = genomic RNA
cctgcccgagaggatcagtcct

SEQ ID NO: 3509 - RNA, 23 nt, Homo sapiens
  source 1..23: mol_type = genomic RNA
agccgacccctccggacagcccg

SEQ ID NO: 3510 - RNA, 23 nt, Homo sapiens
  source 1..23: mol_type = genomic RNA
ctgcaggcaaaggagaatacaga

SEQ ID NO: 3511 - RNA, 23 nt, Homo sapiens
  source 1..23: mol_type = genomic RNA
tctgtaaatatccctttgcctga

SEQ ID NO: 3512 - RNA, 21 nt, Homo sapiens
  source 1..21: mol_type = genomic RNA
ctggaccagaaaagacagaaa

SEQ ID NO: 3513 - RNA, 23 nt, Homo sapiens
  source 1..23: mol_type = genomic RNA
atgcctcctgtcccatccggcca

SEQ ID NO: 3514 - RNA, 23 nt, Homo sapiens
  source 1..23: mol_type = genomic RNA
catagcgaagtctagtctttaga

SEQ ID NO: 3515 - RNA, 23 nt, Homo sapiens
  source 1..23: mol_type = genomic RNA
gaccgtgagacgtcgccgggcca

SEQ ID NO: 3516 - RNA, 23 nt, Homo sapiens
  source 1..23: mol_type = genomic RNA
cgccgtcccgggagccccactca

SEQ ID NO: 3517 - RNA, 21 nt, Homo sapiens
  source 1..21: mol_type = genomic RNA
tcggcccgcaggagcaccgct

SEQ ID NO: 3518 - RNA, 23 nt, Homo sapiens
  source 1..23: mol_type = genomic RNA
tctgcaggttctcctgggaccgg

SEQ ID NO: 3519 - RNA, 22 nt, Homo sapiens
  source 1..22: mol_type = genomic RNA
ctgggaggaaagcccgggcctt

SEQ ID NO: 3520 - RNA, 22 nt, Homo sapiens
  source 1..22: mol_type = genomic RNA
ctaagaccaagcctccttccct

SEQ ID NO: 3521 - RNA, 21 nt, Homo sapiens
  source 1..21: mol_type = genomic RNA
agcaaatcctccccaaacctc

SEQ ID NO: 3522 - RNA, 20 nt, Homo sapiens
  source 1..20: mol_type = genomic RNA
ctgtgggggcaggaggggcg

SEQ ID NO: 3523 - RNA, 22 nt, Homo sapiens
  source 1..22: mol_type = genomic RNA
gatgccctggcctgtccccgca

SEQ ID NO: 3524 - RNA, 22 nt, Homo sapiens
  source 1..22: mol_type = genomic RNA
ctgcgggagggggtgggtcagg

SEQ ID NO: 3525 - RNA, 22 nt, Homo sapiens
  source 1..22: mol_type = genomic RNA
cactcaaccacctccgcccgag

SEQ ID NO: 3526 - RNA, 24 nt, Homo sapiens
  source 1..24: mol_type = genomic RNA
ccttctagcagctacgggtcctct

SEQ ID NO: 3527 - RNA, 22 nt, Homo sapiens
  source 1..22: mol_type = genomic RNA
agcacatccttgagatccacaa

SEQ ID NO: 3528 - RNA, 22 nt, Homo sapiens
  source 1..22: mol_type = genomic RNA
acacaaggctaaagaaagagaa

SEQ ID NO: 3529 - RNA, 22 nt, Homo sapiens
  source 1..22: mol_type = genomic RNA
ctgttctcttcctttggccttg

SEQ ID NO: 3530 - RNA, 23 nt, Homo sapiens
  source 1..23: mol_type = genomic RNA
actccgctaacccaggtccgcat

SEQ ID NO: 3531 - RNA, 22 nt, Homo sapiens
  source 1..22: mol_type = genomic RNA
actttcccttcagagcctggct

SEQ ID NO: 3532 - RNA, 22 nt, Homo sapiens
  source 1..22: mol_type = genomic RNA
aaagccaggctctgaagggaaa

SEQ ID NO: 3533 - RNA, 22 nt, Homo sapiens
  source 1..22: mol_type = genomic RNA
ataggaaggcaaccatctctgg

SEQ ID NO: 3534 - RNA, 23 nt, Homo sapiens
  source 1..23: mol_type = genomic RNA
agcagagagtgagcgcctccctg

SEQ ID NO: 3535 - RNA, 22 nt, Homo sapiens
  source 1..22: mol_type = genomic RNA
gcgaagcctctgtgacgtcatg

SEQ ID NO: 3536 - RNA, 23 nt, Homo sapiens
  source 1..23: mol_type = genomic RNA
acaccgtgacgtcacagaggcct

SEQ ID NO: 3537 - RNA, 23 nt, Homo sapiens
  source 1..23: mol_type = genomic RNA
gagggtggtcagcaggtggggca

SEQ ID NO: 3538 - RNA, 23 nt, Homo sapiens
  source 1..23: mol_type = genomic RNA
cagccccaccggctcccactcac

SEQ ID NO: 3539 - RNA, 21 nt, Homo sapiens
  source 1..21: mol_type = genomic RNA
taattccaacatctagtccta

SEQ ID NO: 3540 - RNA, 22 nt, Homo sapiens
  source 1..22: mol_type = genomic RNA
ggtttagattgaacatgaattt

SEQ ID NO: 3541 - RNA, 22 nt, Homo sapiens
  source 1..22: mol_type = genomic RNA
ctaacttcatgttcaatctaaa

SEQ ID NO: 3542 - RNA, 21 nt, Homo sapiens
  source 1..21: mol_type = genomic RNA
ggacaaagtgcgcatgccctc

SEQ ID NO: 3543 - RNA, 21 nt, Homo sapiens
  source 1..21: mol_type = genomic RNA
ggtcaggcatgcacaccttgt

SEQ ID NO: 3544 - RNA, 22 nt, Homo sapiens
  source 1..22: mol_type = genomic RNA
caccacaaatcttgatcagaag

SEQ ID NO: 3545 - RNA, 21 nt, Homo sapiens
  source 1..21: mol_type = genomic RNA
aggcttctgatcaagatttgg

SEQ ID NO: 3546 - RNA, 24 nt, Homo sapiens
  source 1..24: mol_type = genomic RNA
cccgcccagcaccagcccctgcct

SEQ ID NO: 3547 - RNA, 21 nt, Homo sapiens
  source 1..21: mol_type = genomic RNA
agcaggagggctgggcaggcg

SEQ ID NO: 3548 - RNA, 22 nt, Homo sapiens
  source 1..22: mol_type = genomic RNA
ccatgggtgtgaaaggagttaa

SEQ ID NO: 3549 - RNA, 21 nt, Homo sapiens
  source 1..21: mol_type = genomic RNA
agataactccttccacatcca

SEQ ID NO: 3550 - RNA, 22 nt, Homo sapiens
  source 1..22: mol_type = genomic RNA
gaacatagctatcaatcactca

SEQ ID NO: 3551 - RNA, 21 nt, Homo sapiens
  source 1..21: mol_type = genomic RNA
ttccaaaagagcaattgctat

SEQ ID NO: 3552 - RNA, 21 nt, Homo sapiens
  source 1..21: mol_type = genomic RNA
aacaccaactgctctttcaga

SEQ ID NO: 3553 - RNA, 23 nt, Homo sapiens
  source 1..23: mol_type = genomic RNA
ggcggcggccaggagcgcccgcg

SEQ ID NO: 3554 - RNA, 20 nt, Homo sapiens
  source 1..20: mol_type = genomic RNA
attctctctggatctcctgg

SEQ ID NO: 3555 - RNA, 22 nt, Homo sapiens
  source 1..22: mol_type = genomic RNA
atccatgggatccagagagaat

SEQ ID NO: 3556 - RNA, 22 nt, Homo sapiens
  source 1..22: mol_type = genomic RNA
gtaggggagggaggatggcaga

SEQ ID NO: 3557 - RNA, 24 nt, Homo sapiens
  source 1..24: mol_type = genomic RNA
ctcataccttctctccatcccacc

SEQ ID NO: 3558 - RNA, 18 nt, Homo sapiens
  source 1..18: mol_type = genomic RNA
agctacagtgtcatctca

SEQ ID NO: 3559 - RNA, 21 nt, Homo sapiens
  source 1..21: mol_type = genomic RNA
taattgtaggtcaagtctgct

SEQ ID NO: 3560 - RNA, 22 nt, Homo sapiens
  source 1..22: mol_type = genomic RNA
tctgatcaggcaaagttgcagg

SEQ ID NO: 3561 - RNA, 22 nt, Homo sapiens
  source 1..22: mol_type = genomic RNA
agtctgcaattttgcctgatca

SEQ ID NO: 3562 - RNA, 22 nt, Homo sapiens
  source 1..22: mol_type = genomic RNA
gcctttctatgctcctgttctg

SEQ ID NO: 3563 - RNA, 21 nt, Homo sapiens
  source 1..21: mol_type = genomic RNA
ttctggcacatgttaggcaat

SEQ ID NO: 3564 - RNA, 22 nt, Homo sapiens
  source 1..22: mol_type = genomic RNA
ttattacctactacataccaga

SEQ ID NO: 3565 - RNA, 22 nt, Homo sapiens
  source 1..22: mol_type = genomic RNA
agtgaccgaaacaaaaaattaa

SEQ ID NO: 3566 - RNA, 23 nt, Homo sapiens
  source 1..23: mol_type = genomic RNA
atgcagtggaccaggatggcaag

SEQ ID NO: 3567 - RNA, 22 nt, Homo sapiens
  source 1..22: mol_type = genomic RNA
agcccttgccatcctggtccac

SEQ ID NO: 3568 - RNA, 22 nt, Homo sapiens
  source 1..22: mol_type = genomic RNA
tacagcattctagatgaggtat

SEQ ID NO: 3569 - RNA, 22 nt, Homo sapiens
  source 1..22: mol_type = genomic RNA
tatatatatctctcatctagaa

SEQ ID NO: 3570 - RNA, 22 nt, Homo sapiens
  source 1..22: mol_type = genomic RNA
tcaactctgcaaaggaagaaga

SEQ ID NO: 3571 - RNA, 22 nt, Homo sapiens
  source 1..22: mol_type = genomic RNA
cctcttcttcctttacagaatt

SEQ ID NO: 3572 - RNA, 22 nt, Homo sapiens
  source 1..22: mol_type = genomic RNA
ctgcttttactattccctccta

SEQ ID NO: 3573 - RNA, 22 nt, Homo sapiens
  source 1..22: mol_type = genomic RNA
gctagggatcaggctcaagggt

SEQ ID NO: 3574 - RNA, 22 nt, Homo sapiens
  source 1..22: mol_type = genomic RNA
ctctagcgaggattccaacatt

SEQ ID NO: 3575 - RNA, 21 nt, Homo sapiens
  source 1..21: mol_type = genomic RNA
ccaatattggaatccccgcta

SEQ ID NO: 3576 - RNA, 22 nt, Homo sapiens
  source 1..22: mol_type = genomic RNA
gttctagatatgaagacaatca

SEQ ID NO: 3577 - RNA, 22 nt, Homo sapiens
  source 1..22: mol_type = genomic RNA
ttgattgtcttcatatccagaa

SEQ ID NO: 3578 - RNA, 23 nt, Homo sapiens
  source 1..23: mol_type = genomic RNA
gcagacgcgccccaacaccgggg

SEQ ID NO: 3579 - RNA, 21 nt, Homo sapiens
  source 1..21: mol_type = genomic RNA
agcccgggagctgggcgcgcc

SEQ ID NO: 3580 - RNA, 20 nt, Homo sapiens
  source 1..20: mol_type = genomic RNA
tcagtcccagcatctcctca

SEQ ID NO: 3581 - RNA, 21 nt, Homo sapiens
  source 1..21: mol_type = genomic RNA
gctggcggcgtcgccgactct

SEQ ID NO: 3582 - RNA, 22 nt, Homo sapiens
  source 1..22: mol_type = genomic RNA
gcccagaccagagctggcttca

SEQ ID NO: 3583 - RNA, 22 nt, Homo sapiens
  source 1..22: mol_type = genomic RNA
ggtgcatccagtcctggtctca

SEQ ID NO: 3584 - RNA, 24 nt, Homo sapiens
  source 1..24: mol_type = genomic RNA
gcgcggggcagtgggcggcgcatc

SEQ ID NO: 3585 - RNA, 22 nt, Homo sapiens
  source 1..22: mol_type = genomic RNA
gggatgccgccgccacccccgc

SEQ ID NO: 3586 - RNA, 22 nt, Homo sapiens
  source 1..22: mol_type = genomic RNA
gcctcccttagctggtccgtaa

SEQ ID NO: 3587 - RNA, 21 nt, Homo sapiens
  source 1..21: mol_type = genomic RNA
tatatacacctgctatgtgtg

SEQ ID NO: 3588 - RNA, 22 nt, Homo sapiens
  source 1..22: mol_type = genomic RNA
catacacatatcaggtgtatac

SEQ ID NO: 3589 - RNA, 22 nt, Homo sapiens
  source 1..22: mol_type = genomic RNA
tgtgacatcgctttaccattca

SEQ ID NO: 3590 - RNA, 20 nt, Homo sapiens
  source 1..20: mol_type = genomic RNA
aacatgaatggtaaagcgat

SEQ ID NO: 3591 - RNA, 18 nt, Homo sapiens
  source 1..18: mol_type = genomic RNA
tttcagtcatcatatcca

SEQ ID NO: 3592 - RNA, 18 nt, Homo sapiens
  source 1..18: mol_type = genomic RNA
gccagcgagcgctcaccg

SEQ ID NO: 3593 - RNA, 23 nt, Homo sapiens
  source 1..23: mol_type = genomic RNA
agccagccaactcacagtgcaga

SEQ ID NO: 3594 - RNA, 24 nt, Homo sapiens
  source 1..24: mol_type = genomic RNA
cctctgccctgtggagcaggatgt

SEQ ID NO: 3595 - RNA, 22 nt, Homo sapiens
  source 1..22: mol_type = genomic RNA
acagtctcgtgagatagccaga

SEQ ID NO: 3596 - RNA, 22 nt, Homo sapiens
  source 1..22: mol_type = genomic RNA
atccagaagtggctaataatat

SEQ ID NO: 3597 - RNA, 21 nt, Homo sapiens
  source 1..21: mol_type = genomic RNA
tcaatattattagccacttct

SEQ ID NO: 3598 - RNA, 22 nt, Homo sapiens
  source 1..22: mol_type = genomic RNA
gtgtctatactctgccacttta

SEQ ID NO: 3599 - RNA, 22 nt, Homo sapiens
  source 1..22: mol_type = genomic RNA
gtaaagtgacagagtatagaca

SEQ ID NO: 3600 - RNA, 21 nt, Homo sapiens
  source 1..21: mol_type = genomic RNA
acagagtgccacttactgaga

SEQ ID NO: 3601 - RNA, 21 nt, Homo sapiens
  source 1..21: mol_type = genomic RNA
ttcagtaagtggcactctgtc

SEQ ID NO: 3602 - RNA, 22 nt, Homo sapiens
  source 1..22: mol_type = genomic RNA
acttcggtatacttcgtgagtt

SEQ ID NO: 3603 - RNA, 22 nt, Homo sapiens
  source 1..22: mol_type = genomic RNA
ccaattcacaaagtataccgaa

SEQ ID NO: 3604 - RNA, 22 nt, Homo sapiens
  source 1..22: mol_type = genomic RNA
tatataaatgcagcatgccagt

SEQ ID NO: 3605 - RNA, 22 nt, Homo sapiens
  source 1..22: mol_type = genomic RNA
gactggcatgctgcatttagat

SEQ ID NO: 3606 - RNA, 19 nt, Homo sapiens
  source 1..19: mol_type = genomic RNA
gtggacagacggacggatg

SEQ ID NO: 3607 - RNA, 21 nt, Homo sapiens
  source 1..21: mol_type = genomic RNA
tccttccttcctcggtccact

SEQ ID NO: 3608 - RNA, 22 nt, Homo sapiens
  source 1..22: mol_type = genomic RNA
tgagccttggttttcttgtgta

SEQ ID NO: 3609 - RNA, 23 nt, Homo sapiens
  source 1..23: mol_type = genomic RNA
gcttgaaggtttccatccatgta

SEQ ID NO: 3610 - RNA, 22 nt, Homo sapiens
  source 1..22: mol_type = genomic RNA
aacatggtctagaacctccata

SEQ ID NO: 3611 - RNA, 21 nt, Homo sapiens
  source 1..21: mol_type = genomic RNA
tcaatccacactattatgtta

SEQ ID NO: 3612 - RNA, 21 nt, Homo sapiens
  source 1..21: mol_type = genomic RNA
tttcgagggcaaggttaagca

SEQ ID NO: 3613 - RNA, 21 nt, Homo sapiens
  source 1..21: mol_type = genomic RNA
ttgcttaaccttaccgtccaa

SEQ ID NO: 3614 - RNA, 21 nt, Homo sapiens
  source 1..21: mol_type = genomic RNA
aagacgggaggagaggagtga

SEQ ID NO: 3615 - RNA, 22 nt, Homo sapiens
  source 1..22: mol_type = genomic RNA
ctcccttctttcctcccgtctt

SEQ ID NO: 3616 - RNA, 22 nt, Homo sapiens
  source 1..22: mol_type = genomic RNA
atcgggaggggactgagcctga

SEQ ID NO: 3617 - RNA, 22 nt, Homo sapiens
  source 1..22: mol_type = genomic RNA
agagaggagagccgtgtatgac

SEQ ID NO: 3618 - RNA, 22 nt, Homo sapiens
  source 1..22: mol_type = genomic RNA
gaattcatcacggccagcctct

SEQ ID NO: 3619 - RNA, 21 nt, Homo sapiens
  source 1..21: mol_type = genomic RNA
atcctgtactgagctgccccg

SEQ ID NO: 3620 - RNA, 22 nt, Homo sapiens
  source 1..22: mol_type = genomic RNA
ctcggggcagctcagtacagga

SEQ ID NO: 3621 - RNA, 22 nt, Homo sapiens
  source 1..22: mol_type = genomic RNA
aactggatgtccctgtatgatt

SEQ ID NO: 3622 - RNA, 22 nt, Homo sapiens
  source 1..22: mol_type = genomic RNA
aagtggatgaccctgtacgatt

SEQ ID NO: 3623 - RNA, 21 nt, Homo sapiens
  source 1..21: mol_type = genomic RNA
gaccaagaaatagcctttcaa

SEQ ID NO: 3624 - RNA, 21 nt, Homo sapiens
  source 1..21: mol_type = genomic RNA
ttgagagtgccattatctggg

SEQ ID NO: 3625 - RNA, 22 nt, Homo sapiens
  source 1..22: mol_type = genomic RNA
gctgccgtatatgtgatgtcac

SEQ ID NO: 3626 - RNA, 22 nt, Homo sapiens
  source 1..22: mol_type = genomic RNA
cagcatggagtcctccaggttg

SEQ ID NO: 3627 - RNA, 20 nt, Homo sapiens
  source 1..20: mol_type = genomic RNA
acccacctggagatccatgg

SEQ ID NO: 3628 - RNA, 22 nt, Homo sapiens
  source 1..22: mol_type = genomic RNA
gtagaagggaatcttgcataag

SEQ ID NO: 3629 - RNA, 22 nt, Homo sapiens
  source 1..22: mol_type = genomic RNA
cctcatggaagggttccccact

SEQ ID NO: 3630 - RNA, 23 nt, Homo sapiens
  source 1..23: mol_type = genomic RNA
aagaatcttgtcccgcaggtcct

SEQ ID NO: 3631 - RNA, 22 nt, Homo sapiens
  source 1..22: mol_type = genomic RNA
cctggcacacagtagaccttca

SEQ ID NO: 3632 - RNA, 22 nt, Homo sapiens
  source 1..22: mol_type = genomic RNA
aatgaaagcctaccatgtacaa

SEQ ID NO: 3633 - RNA, 22 nt, Homo sapiens
  source 1..22: mol_type = genomic RNA
gaggtttcccgtgtatgtttca

SEQ ID NO: 3634 - RNA, 22 nt, Homo sapiens
  source 1..22: mol_type = genomic RNA
aagaagtgcaccatgtttgttt

SEQ ID NO: 3635 - RNA, 22 nt, Homo sapiens
  source 1..22: mol_type = genomic RNA
cgaaaataacatgggcaacttc

SEQ ID NO: 3636 - RNA, 22 nt, Homo sapiens
  source 1..22: mol_type = genomic RNA
gagattggccatgtaatactca

SEQ ID NO: 3637 - RNA, 22 nt, Homo sapiens
  source 1..22: mol_type = genomic RNA
tctaacaccacagtgtggtttg

SEQ ID NO: 3638 - RNA, 21 nt, Homo sapiens
  source 1..21: mol_type = genomic RNA
acaaaccacagtgtgctgctg

SEQ ID NO: 3639 - RNA, 23 nt, Homo sapiens
  source 1..23: mol_type = genomic RNA
gaaaaacgccccctggcttgaaa

SEQ ID NO: 3640 - RNA, 20 nt, Homo sapiens
  source 1..20: mol_type = genomic RNA
actgtattgtcaggtagtga

SEQ ID NO: 3641 - RNA, 21 nt, Homo sapiens
  source 1..21: mol_type = genomic RNA
tcactacctgacaatacagca

SEQ ID NO: 3642 - RNA, 22 nt, Homo sapiens
  source 1..22: mol_type = genomic RNA
agcacagacttgctgtgatgtt

SEQ ID NO: 3643 - RNA, 21 nt, Homo sapiens
  source 1..21: mol_type = genomic RNA
aaacatcactgcaagtcttaa

SEQ ID NO: 3644 - RNA, 22 nt, Homo sapiens
  source 1..22: mol_type = genomic RNA
tgttaagacttgcagtgatgtt

SEQ ID NO: 3645 - RNA, 21 nt, Homo sapiens
  source 1..21: mol_type = genomic RNA
tgaacatcacagcaagtctgt

SEQ ID NO: 3646 - RNA, 22 nt, Homo sapiens
  source 1..22: mol_type = genomic RNA
tccaagttcagaagtgtcctga

SEQ ID NO: 3647 - RNA, 22 nt, Homo sapiens
  source 1..22: mol_type = genomic RNA
actcaggaacacttctgaactg

SEQ ID NO: 3648 - RNA, 22 nt, Homo sapiens
  source 1..22: mol_type = genomic RNA
aaggacctggacagaggcagaa

SEQ ID NO: 3649 - RNA, 24 nt, Homo sapiens
  source 1..24: mol_type = genomic RNA
agctccgccgctgagtccagccct

SEQ ID NO: 3650 - RNA, 21 nt, Homo sapiens
  source 1..21: mol_type = genomic RNA
aagtggtcagtgaggcagtca

SEQ ID NO: 3651 - RNA, 24 nt, Homo sapiens
  source 1..24: mol_type = genomic RNA
actaagtgcctcagaaaccaaatt

SEQ ID NO: 3652 - RNA, 21 nt, Homo sapiens
  source 1..21: mol_type = genomic RNA
ccccaacaacctagaaaagta

SEQ ID NO: 3653 - RNA, 23 nt, Homo sapiens
  source 1..23: mol_type = genomic RNA
tctaccctgcaaggttgttgtga

SEQ ID NO: 3654 - RNA, 22 nt, Homo sapiens
  source 1..22: mol_type = genomic RNA
ctgaggcccaggaaaatccaag

SEQ ID NO: 3655 - RNA, 22 nt, Homo sapiens
  source 1..22: mol_type = genomic RNA
tcgtgaatttgccctgtcctca

SEQ ID NO: 3656 - RNA, 21 nt, Homo sapiens
  source 1..21: mol_type = genomic RNA
ctgccaggatggaaagggaaa

SEQ ID NO: 3657 - RNA, 21 nt, Homo sapiens
  source 1..21: mol_type = genomic RNA
ttccacctcctgccctggcaa

SEQ ID NO: 3658 - RNA, 22 nt, Homo sapiens
  source 1..22: mol_type = genomic RNA
attagagtttggttcatatgat

SEQ ID NO: 3659 - RNA, 22 nt, Homo sapiens
  source 1..22: mol_type = genomic RNA
aaaccatatcagccagactcta

SEQ ID NO: 3660 - RNA, 21 nt, Homo sapiens
  source 1..21: mol_type = genomic RNA
gcgaggccctgggagcacagg

SEQ ID NO: 3661 - RNA, 22 nt, Homo sapiens
  source 1..22: mol_type = genomic RNA
ccactgtgccccaagggcctca

SEQ ID NO: 3662 - RNA, 22 nt, Homo sapiens
  source 1..22: mol_type = genomic RNA
ttttggactttcagatttagga

SEQ ID NO: 3663 - RNA, 24 nt, Homo sapiens
  source 1..24: mol_type = genomic RNA
atccccaaatctgaaaaagtccaa

SEQ ID NO: 3664 - RNA, 22 nt, Homo sapiens
  source 1..22: mol_type = genomic RNA
cagaatccttgcccaggtgcat

SEQ ID NO: 3665 - RNA, 23 nt, Homo sapiens
  source 1..23: mol_type = genomic RNA
tctcacccaggtagcaaggatta

SEQ ID NO: 3666 - RNA, 18 nt, Homo sapiens
  source 1..18: mol_type = genomic RNA
acccaggtagcaaggatt

SEQ ID NO: 3667 - RNA, 22 nt, Homo sapiens
  source 1..22: mol_type = genomic RNA
ctggggaatgggagacacaaaa

SEQ ID NO: 3668 - RNA, 22 nt, Homo sapiens
  source 1..22: mol_type = genomic RNA
aattttgctctgccatccccct

SEQ ID NO: 3669 - RNA, 22 nt, Homo sapiens
  source 1..22: mol_type = genomic RNA
tgttatatatacagccatgcac

SEQ ID NO: 3670 - RNA, 21 nt, Homo sapiens
  source 1..21: mol_type = genomic RNA
gagtgcatggctgtatatata

SEQ ID NO: 3671 - RNA, 22 nt, Homo sapiens
  source 1..22: mol_type = genomic RNA
agaatccttgcccgggtgcatt

SEQ ID NO: 3672 - RNA, 22 nt, Homo sapiens
  source 1..22: mol_type = genomic RNA
tctcacccagggacaaaggatt

SEQ ID NO: 3673 - RNA, 22 nt, Homo sapiens
  source 1..22: mol_type = genomic RNA
tgaatccttgcccaggtgcatt

SEQ ID NO: 3674 - RNA, 21 nt, Homo sapiens
  source 1..21: mol_type = genomic RNA
tagcacccagatagcaaggat

SEQ ID NO: 3675 - RNA, 23 nt, Homo sapiens
  source 1..23: mol_type = genomic RNA
cctggcagcggaaacaatacccc

SEQ ID NO: 3676 - RNA, 23 nt, Homo sapiens
  source 1..23: mol_type = genomic RNA
ctgcagaactgttcccgctgcta

SEQ ID NO: 3677 - RNA, 22 nt, Homo sapiens
  source 1..22: mol_type = genomic RNA
gatagagtgcagaccagggtct

SEQ ID NO: 3678 - RNA, 21 nt, Homo sapiens
  source 1..21: mol_type = genomic RNA
accttacaaccgcagctgcaa

SEQ ID NO: 3679 - RNA, 22 nt, Homo sapiens
  source 1..22: mol_type = genomic RNA
aggaaaccagcaagtgttgacg

SEQ ID NO: 3680 - RNA, 22 nt, Homo sapiens
  source 1..22: mol_type = genomic RNA
acatcaatacttcctggctccc

SEQ ID NO: 3681 - RNA, 21 nt, Homo sapiens
  source 1..21: mol_type = genomic RNA
tctactcagaagggtgcctta

SEQ ID NO: 3682 - RNA, 22 nt, Homo sapiens
  source 1..22: mol_type = genomic RNA
ttaagtaacaccttcctgaata

SEQ ID NO: 3683 - RNA, 21 nt, Homo sapiens
  source 1..21: mol_type = genomic RNA
ttcactccaaaaggtgcaaaa

SEQ ID NO: 3684 - RNA, 23 nt, Homo sapiens
  source 1..23: mol_type = genomic RNA
tctactccaaaaggctacaatca

SEQ ID NO: 3685 - RNA, 23 nt, Homo sapiens
  source 1..23: mol_type = genomic RNA
catgagtgacgccctctggagta

SEQ ID NO: 3686 - RNA, 23 nt, Homo sapiens
  source 1..23: mol_type = genomic RNA
catgccagcaaagctacaaaccc

SEQ ID NO: 3687 - RNA, 23 nt, Homo sapiens
  source 1..23: mol_type = genomic RNA
ctccatccaatccctgagccctg

SEQ ID NO: 3688 - RNA, 23 nt, Homo sapiens
  source 1..23: mol_type = genomic RNA
tcagtgggatttccgagtagcat

SEQ ID NO: 3689 - RNA, 21 nt, Homo sapiens
  source 1..21: mol_type = genomic RNA
gatgctactcagaaatcccac

SEQ ID NO: 3690 - RNA, 23 nt, Homo sapiens
  source 1..23: mol_type = genomic RNA
caccctacaccaatctgccccgg

SEQ ID NO: 3691 - RNA, 23 nt, Homo sapiens
  source 1..23: mol_type = genomic RNA
cagcacagtcttgtcgtctccgt

SEQ ID NO: 3692 - RNA, 22 nt, Homo sapiens
  source 1..22: mol_type = genomic RNA
gatgccaagctcagcgtggatt

SEQ ID NO: 3693 - RNA, 23 nt, Homo sapiens
  source 1..23: mol_type = genomic RNA
gctcctagccagcctcatttcct

SEQ ID NO: 3694 - RNA, 22 nt, Homo sapiens
  source 1..22: mol_type = genomic RNA
catgattgccacgtctgcagta

SEQ ID NO: 3695 - RNA, 22 nt, Homo sapiens
  source 1..22: mol_type = genomic RNA
ctacccacagacgtaccaatca

SEQ ID NO: 3696 - RNA, 22 nt, Homo sapiens
  source 1..22: mol_type = genomic RNA
aggttcaaggcattcactgatt

SEQ ID NO: 3697 - RNA, 21 nt, Homo sapiens
  source 1..21: mol_type = genomic RNA
cgcggtggttcacgcctgtaa

SEQ ID NO: 3698 - RNA, 21 nt, Homo sapiens
  source 1..21: mol_type = genomic RNA
tgattgccactgtctgcagta

SEQ ID NO: 3699 - RNA, 21 nt, Homo sapiens
  source 1..21: mol_type = genomic RNA
gcctgaccaacatggtgaaac

SEQ ID NO: 3700 - RNA, 22 nt, Homo sapiens
  source 1..22: mol_type = genomic RNA
gtgattgccactctcctgagta

SEQ ID NO: 3701 - RNA, 22 nt, Homo sapiens
  source 1..22: mol_type = genomic RNA
agaggcaccgctgggatctgaa

SEQ ID NO: 3702 - RNA, 21 nt, Homo sapiens
  source 1..21: mol_type = genomic RNA
tgactgcagagcaaaagacac

SEQ ID NO: 3703 - RNA, 22 nt, Homo sapiens
  source 1..22: mol_type = genomic RNA
gacctcagctatgacagcactt

SEQ ID NO: 3704 - RNA, 23 nt, Homo sapiens
  source 1..23: mol_type = genomic RNA
gaaagtgccctcaaggctgagtg

SEQ ID NO: 3705 - RNA, 23 nt, Homo sapiens
  source 1..23: mol_type = genomic RNA
ccttctcagaaaggtgaaattta

SEQ ID NO: 3706 - RNA, 18 nt, Homo sapiens
  source 1..18: mol_type = genomic RNA
atgacacctccctgtgaa

SEQ ID NO: 3707 - RNA, 22 nt, Homo sapiens
  source 1..22: mol_type = genomic RNA
ataaatgacacctccttgtgaa

SEQ ID NO: 3708 - RNA, 23 nt, Homo sapiens
  source 1..23: mol_type = genomic RNA
tcttctcagaaaggtgaaattta

SEQ ID NO: 3709 - RNA, 22 nt, Homo sapiens
  source 1..22: mol_type = genomic RNA
ataaacgacacctccttgagaa

SEQ ID NO: 3710 - RNA, 21 nt, Homo sapiens
  source 1..21: mol_type = genomic RNA
tctactcacagaagtgtcaat

SEQ ID NO: 3711 - RNA, 23 nt, Homo sapiens
  source 1..23: mol_type = genomic RNA
catgattgtcactctccagagta

SEQ ID NO: 3712 - RNA, 21 nt, Homo sapiens
  source 1..21: mol_type = genomic RNA
tccactcacagaggtgtcaat

SEQ ID NO: 3713 - RNA, 22 nt, Homo sapiens
  source 1..22: mol_type = genomic RNA
atgattgcctccctcttgagaa

SEQ ID NO: 3714 - RNA, 22 nt, Homo sapiens
  source 1..22: mol_type = genomic RNA
aacgctccaaaagaaggcactc

SEQ ID NO: 3715 - RNA, 24 nt, Homo sapiens
  source 1..24: mol_type = genomic RNA
cagaaagtgctttcttttggagaa

SEQ ID NO: 3716 - RNA, 18 nt, Homo sapiens
  source 1..18: mol_type = genomic RNA
accctctgaaaggaagca

SEQ ID NO: 3717 - RNA, 23 nt, Homo sapiens
  source 1..23: mol_type = genomic RNA
gaaagtgcttctttcctcgagaa

SEQ ID NO: 3718 - RNA, 18 nt, Homo sapiens
  source 1..18: mol_type = genomic RNA
accctctgaaaggaagca

SEQ ID NO: 3719 - RNA, 22 nt, Homo sapiens
  source 1..22: mol_type = genomic RNA
aaagtgcttcttacctccagat

SEQ ID NO: 3720 - RNA, 22 nt, Homo sapiens
  source 1..22: mol_type = genomic RNA
agacagtgcttccatctagagg

SEQ ID NO: 3721 - RNA, 22 nt, Homo sapiens
  source 1..22: mol_type = genomic RNA
acactctaaagggatgcacgat

SEQ ID NO: 3722 - RNA, 22 nt, Homo sapiens
  source 1..22: mol_type = genomic RNA
acactctaaagggatgcacgat

SEQ ID NO: 3723 - RNA, 22 nt, Homo sapiens
  source 1..22: mol_type = genomic RNA
acactctaaaaggatgcacgat

SEQ ID NO: 3724 - RNA, 21 nt, Homo sapiens
  source 1..21: mol_type = genomic RNA
acctgatttctaccaatctct

SEQ ID NO: 3725 - RNA, 21 nt, Homo sapiens
  source 1..21: mol_type = genomic RNA
ctgaggaaaagaggattcagt

SEQ ID NO: 3726 - RNA, 22 nt, Homo sapiens
  source 1..22: mol_type = genomic RNA
tccacttcaatccctcatccca

SEQ ID NO: 3727 - RNA, 23 nt, Homo sapiens
  source 1..23: mol_type = genomic RNA
ctccggtttaaatgggtccgatt

SEQ ID NO: 3728 - RNA, 24 nt, Homo sapiens
  source 1..24: mol_type = genomic RNA
cctgtccatccgcctgtgcccaga

SEQ ID NO: 3729 - RNA, 22 nt, Homo sapiens
  source 1..22: mol_type = genomic RNA
tccagcaaagggaagcgctttc

SEQ ID NO: 3730 - RNA, 20 nt, Homo sapiens
  source 1..20: mol_type = genomic RNA
gaaagggcttccctttgcag

SEQ ID NO: 3731 - RNA, 22 nt, Homo sapiens
  source 1..22: mol_type = genomic RNA
acctctaaaggggagcgctttg

SEQ ID NO: 3732 - RNA, 23 nt, Homo sapiens
  source 1..23: mol_type = genomic RNA
acactctaaagagaagcgctttg

SEQ ID NO: 3733 - RNA, 23 nt, Homo sapiens
  source 1..23: mol_type = genomic RNA
cagaaagtgcttccctccagaga

SEQ ID NO: 3734 - RNA, 21 nt, Homo sapiens
  source 1..21: mol_type = genomic RNA
gctccaaagggaagcgctttg

SEQ ID NO: 3735 - RNA, 22 nt, Homo sapiens
  source 1..22: mol_type = genomic RNA
cagaaagtgcttccctctagag

SEQ ID NO: 3736 - RNA, 21 nt, Homo sapiens
  source 1..21: mol_type = genomic RNA
cactctgaagggaagcgcttt

SEQ ID NO: 3737 - RNA, 22 nt, Homo sapiens
  source 1..22: mol_type = genomic RNA
cagaaagcgcttccctctagag

SEQ ID NO: 3738 - RNA, 21 nt, Homo sapiens
  source 1..21: mol_type = genomic RNA
cctctaaagagaagcgctttc

SEQ ID NO: 3739 - RNA, 22 nt, Homo sapiens
  source 1..22: mol_type = genomic RNA
gagaaagtgcttccctctagag

SEQ ID NO: 3740 - RNA, 21 nt, Homo sapiens
  source 1..21: mol_type = genomic RNA
tggctccagctcagtcactgg

SEQ ID NO: 3741 - RNA, 22 nt, Homo sapiens
  source 1..22: mol_type = genomic RNA
agcacttcattcttcctatcct

SEQ ID NO: 3742 - RNA, 22 nt, Homo sapiens
  source 1..22: mol_type = genomic RNA
accacctggaatccactctcct

SEQ ID NO: 3743 - RNA, 22 nt, Homo sapiens
  source 1..22: mol_type = genomic RNA
actgggatgaggtagaggagga

SEQ ID NO: 3744 - RNA, 22 nt, Homo sapiens
  source 1..22: mol_type = genomic RNA
ccatcccattccaaacccctca

SEQ ID NO: 3745 - RNA, 21 nt, Homo sapiens
  source 1..21: mol_type = genomic RNA
agccccctcagagaactggat

SEQ ID NO: 3746 - RNA, 22 nt, Homo sapiens
  source 1..22: mol_type = genomic RNA
ccatccagttgccttaggggtt

SEQ ID NO: 3747 - RNA, 21 nt, Homo sapiens
  source 1..21: mol_type = genomic RNA
ctgggagggagacgaggatga

SEQ ID NO: 3748 - RNA, 22 nt, Homo sapiens
  source 1..22: mol_type = genomic RNA
cccaaccctcgtccccttccct

SEQ ID NO: 3749 - RNA, 23 nt, Homo sapiens
  source 1..23: mol_type = genomic RNA
attcgatgactcagtctcttctt

SEQ ID NO: 3750 - RNA, 23 nt, Homo sapiens
  source 1..23: mol_type = genomic RNA
tcaagaatgagtttgtgccattg

SEQ ID NO: 3751 - RNA, 22 nt, Homo sapiens
  source 1..22: mol_type = genomic RNA
acactctaaaaggatgcacttt

SEQ ID NO: 3752 - RNA, 22 nt, Homo sapiens
  source 1..22: mol_type = genomic RNA
cagaaagcgcttccctctagag

SEQ ID NO: 3753 - RNA, 22 nt, Homo sapiens
  source 1..22: mol_type = genomic RNA
aacctctaaaaggatgcacttt

SEQ ID NO: 3754 - RNA, 22 nt, Homo sapiens
  source 1..22: mol_type = genomic RNA
cagaaagcgcttccctctagag

SEQ ID NO: 3755 - RNA, 22 nt, Homo sapiens
  source 1..22: mol_type = genomic RNA
atcctctaaaaagatgcacttt

SEQ ID NO: 3756 - RNA, 22 nt, Homo sapiens
  source 1..22: mol_type = genomic RNA
cagaaagcgcttccctctagag

SEQ ID NO: 3757 - RNA, 22 nt, Homo sapiens
  source 1..22: mol_type = genomic RNA
cactctaaagggaggcactttg

SEQ ID NO: 3758 - RNA, 22 nt, Homo sapiens
  source 1..22: mol_type = genomic RNA
aacactctaaaaggaggcactt

SEQ ID NO: 3759 - RNA, 22 nt, Homo sapiens
  source 1..22: mol_type = genomic RNA
gaaagtgctcccttttggagaa

SEQ ID NO: 3760 - RNA, 22 nt, Homo sapiens
  source 1..22: mol_type = genomic RNA
acagtccaaagggaagcacttt

SEQ ID NO: 3761 - RNA, 21 nt, Homo sapiens
  source 1..21: mol_type = genomic RNA
agaaagtacttccctctggag

SEQ ID NO: 3762 - RNA, 21 nt, Homo sapiens
  source 1..21: mol_type = genomic RNA
ccctctaaaaggaagcacttt

SEQ ID NO: 3763 - RNA, 22 nt, Homo sapiens
  source 1..22: mol_type = genomic RNA
accctctaaaaggaagcacttt

SEQ ID NO: 3764 - RNA, 22 nt, Homo sapiens
  source 1..22: mol_type = genomic RNA
cagaaagtgcttccctctagag

SEQ ID NO: 3765 - RNA, 22 nt, Homo sapiens
  source 1..22: mol_type = genomic RNA
acccaccaaagagaagcacttt

SEQ ID NO: 3766 - RNA, 20 nt, Homo sapiens
  source 1..20: mol_type = genomic RNA
gaaagggcttccctttgtag

SEQ ID NO: 3767 - RNA, 21 nt, Homo sapiens
  source 1..21: mol_type = genomic RNA
ccctcaaaaaggaagcacttt

SEQ ID NO: 3768 - RNA, 22 nt, Homo sapiens
  source 1..22: mol_type = genomic RNA
aaccctctaaaaggaagcactt

SEQ ID NO: 3769 - RNA, 24 nt, Homo sapiens
  source 1..24: mol_type = genomic RNA
acactctaaagggaagcactttgt

SEQ ID NO: 3770 - RNA, 22 nt, Homo sapiens
  source 1..22: mol_type = genomic RNA
actctaaagggaagcactttgt

SEQ ID NO: 3771 - RNA, 22 nt, Homo sapiens
  source 1..22: mol_type = genomic RNA
acactctaaagggaagtgcgtt

SEQ ID NO: 3772 - RNA, 22 nt, Homo sapiens
  source 1..22: mol_type = genomic RNA
acactctaaagggaaccatttt

SEQ ID NO: 3773 - RNA, 22 nt, Homo sapiens
  source 1..22: mol_type = genomic RNA
cagaaagcgcttccctctagag

SEQ ID NO: 3774 - RNA, 23 nt, Homo sapiens
  source 1..23: mol_type = genomic RNA
accctctatagggaagcgcgttc

SEQ ID NO: 3775 - RNA, 22 nt, Homo sapiens
  source 1..22: mol_type = genomic RNA
cagaaagcgcttccctctagag

SEQ ID NO: 3776 - RNA, 21 nt, Homo sapiens
  source 1..21: mol_type = genomic RNA
actccaaagggaagcgccttc

SEQ ID NO: 3777 - RNA, 22 nt, Homo sapiens
  source 1..22: mol_type = genomic RNA
gagaaagtgcttccctttgtag

SEQ ID NO: 3778 - RNA, 22 nt, Homo sapiens
  source 1..22: mol_type = genomic RNA
cgctctaaagggaagcgccttc

SEQ ID NO: 3779 - RNA, 21 nt, Homo sapiens
  source 1..21: mol_type = genomic RNA
agaaagtgcatccctctggag

SEQ ID NO: 3780 - RNA, 22 nt, Homo sapiens
  source 1..22: mol_type = genomic RNA
cagaaagtgcttccctctagag

SEQ ID NO: 3781 - RNA, 22 nt, Homo sapiens
  source 1..22: mol_type = genomic RNA
gcctctaaaaggaagcactttc

SEQ ID NO: 3782 - RNA, 23 nt, Homo sapiens
  source 1..23: mol_type = genomic RNA
acagaaagtgcttccctcaagag

SEQ ID NO: 3783 - RNA, 20 nt, Homo sapiens
  source 1..20: mol_type = genomic RNA
gaaagggcttccctttgcag

SEQ ID NO: 3784 - RNA, 22 nt, Homo sapiens
  source 1..22: mol_type = genomic RNA
tgcaagccttgggtgtgggagg

SEQ ID NO: 3785 - RNA, 22 nt, Homo sapiens
  source 1..22: mol_type = genomic RNA
acggtcctacactcaaggcatg

SEQ ID NO: 3786 - RNA, 22 nt, Homo sapiens
  source 1..22: mol_type = genomic RNA
aaagaaattgtccttgtatgat

SEQ ID NO: 3787 - RNA, 22 nt, Homo sapiens
  source 1..22: mol_type = genomic RNA
acacaccaaggataatttctcc

SEQ ID NO: 3788 - RNA, 22 nt, Homo sapiens
  source 1..22: mol_type = genomic RNA
agtccagattctgtgcccacca

SEQ ID NO: 3789 - RNA, 25 nt, Homo sapiens
  source 1..25: mol_type = genomic RNA
agtgggaccgacagcagaatccttt

SEQ ID NO: 3790 - RNA, 22 nt, Homo sapiens
  source 1..22: mol_type = genomic RNA
tttcagttatcaatctgtcaca

SEQ ID NO: 3791 - RNA, 23 nt, Homo sapiens
  source 1..23: mol_type = genomic RNA
tctcgtgacatgatgatccccga

SEQ ID NO: 3792 - RNA, 22 nt, Homo sapiens
  source 1..22: mol_type = genomic RNA
aagaagtgcaccgcgaatgttt

SEQ ID NO: 3793 - RNA, 22 nt, Homo sapiens
  source 1..22: mol_type = genomic RNA
gaacttgctaaaaatgcagaat

SEQ ID NO: 3794 - RNA, 22 nt, Homo sapiens
  source 1..22: mol_type = genomic RNA
ttagaaatgcacaacctcaggt

SEQ ID NO: 3795 - RNA, 22 nt, Homo sapiens
  source 1..22: mol_type = genomic RNA
gcacacaataaatgtttgctga

SEQ ID NO: 3796 - RNA, 22 nt, Homo sapiens
  source 1..22: mol_type = genomic RNA
tcatctaataaacatttactga

SEQ ID NO: 3797 - RNA, 22 nt, Homo sapiens
  source 1..22: mol_type = genomic RNA
tggtgcaaaagtaactgtagct

SEQ ID NO: 3798 - RNA, 20 nt, Homo sapiens
  source 1..20: mol_type = genomic RNA
gaaagtaattgcagttttta

SEQ ID NO: 3799 - RNA, 23 nt, Homo sapiens
  source 1..23: mol_type = genomic RNA
caaaaactgcaattacttttgca

SEQ ID NO: 3800 - RNA, 22 nt, Homo sapiens
  source 1..22: mol_type = genomic RNA
tggcaaaaccgcaattacttct

SEQ ID NO: 3801 - RNA, 22 nt, Homo sapiens
  source 1..22: mol_type = genomic RNA
gcaaaagtaattgccagttttg

SEQ ID NO: 3802 - RNA, 22 nt, Homo sapiens
  source 1..22: mol_type = genomic RNA
ggtaaaactcgcaattactttt

SEQ ID NO: 3803 - RNA, 25 nt, Homo sapiens
  source 1..25: mol_type = genomic RNA
tggtgcaaaagtaattgtggttttt

SEQ ID NO: 3804 - RNA, 22 nt, Homo sapiens
  source 1..22: mol_type = genomic RNA
agcaaaatccacaattactttt

SEQ ID NO: 3805 - RNA, 22 nt, Homo sapiens
  source 1..22: mol_type = genomic RNA
caaaagtaattgccggtttttg

SEQ ID NO: 3806 - RNA, 22 nt, Homo sapiens
  source 1..22: mol_type = genomic RNA
tgcaaaagtcattgtcgttttc

SEQ ID NO: 3807 - RNA, 21 nt, Homo sapiens
  source 1..21: mol_type = genomic RNA
tgaaagtaattgcagtttttg

SEQ ID NO: 3808 - RNA, 21 nt, Homo sapiens
  source 1..21: mol_type = genomic RNA
gcagaaaccacaattaccttt

SEQ ID NO: 3809 - RNA, 22 nt, Homo sapiens
  source 1..22: mol_type = genomic RNA
gcaaaagtaactgcagtttttg

SEQ ID NO: 3810 - RNA, 20 nt, Homo sapiens
  source 1..20: mol_type = genomic RNA
caaacactgcaatcactttt

SEQ ID NO: 3811 - RNA, 22 nt, Homo sapiens
  source 1..22: mol_type = genomic RNA
gggaaaaactgcaattaccttt

SEQ ID NO: 3812 - RNA, 21 nt, Homo sapiens
  source 1..21: mol_type = genomic RNA
taaaagtaattgcagttttta

SEQ ID NO: 3813 - RNA, 23 nt, Homo sapiens
  source 1..23: mol_type = genomic RNA
caaaaactgcaattacttttgca

SEQ ID NO: 3814 - RNA, 21 nt, Homo sapiens
  source 1..21: mol_type = genomic RNA
tcaaaaaccgcagttactttt

SEQ ID NO: 3815 - RNA, 22 nt, Homo sapiens
  source 1..22: mol_type = genomic RNA
tggtacaaaagtcattgccgtt

SEQ ID NO: 3816 - RNA, 22 nt, Homo sapiens
  source 1..22: mol_type = genomic RNA
acaaaagtaactgcagtttttg

SEQ ID NO: 3817 - RNA, 22 nt, Homo sapiens
  source 1..22: mol_type = genomic RNA
ggcaaaaaccgcaattactttt

SEQ ID NO: 3818 - RNA, 20 nt, Homo sapiens
  source 1..20: mol_type = genomic RNA
caaaaaccacaatgcctttt

SEQ ID NO: 3819 - RNA, 22 nt, Homo sapiens
  source 1..22: mol_type = genomic RNA
tgcaaaagtagtcacggtcttt

SEQ ID NO: 3820 - RNA, 22 nt, Homo sapiens
  source 1..22: mol_type = genomic RNA
tgcaaaaaccgtagttacttct

SEQ ID NO: 3821 - RNA, 19 nt, Homo sapiens
  source 1..19: mol_type = genomic RNA
aaaagtaattgtggttttt

SEQ ID NO: 3822 - RNA, 19 nt, Homo sapiens
  source 1..19: mol_type = genomic RNA
aaagaccgcaattactttt

SEQ ID NO: 3823 - RNA, 22 nt, Homo sapiens
  source 1..22: mol_type = genomic RNA
gcaaaagtaattgcagtttttg

SEQ ID NO: 3824 - RNA, 22 nt, Homo sapiens
  source 1..22: mol_type = genomic RNA
ggcaaaaacagcaattactttc

SEQ ID NO: 3825 - RNA, 21 nt, Homo sapiens
  source 1..21: mol_type = genomic RNA
gcaaaaataactgcagtttta

SEQ ID NO: 3826 - RNA, 21 nt, Homo sapiens
  source 1..21: mol_type = genomic RNA
gcaaaaactgcaattactttt

SEQ ID NO: 3827 - RNA, 22 nt, Homo sapiens
  source 1..22: mol_type = genomic RNA
acaaacataattgtgggtttta

SEQ ID NO: 3828 - RNA, 22 nt, Homo sapiens
  source 1..22: mol_type = genomic RNA
ggcaaaacccgcaattactttt

SEQ ID NO: 3829 - RNA, 21 nt, Homo sapiens
  source 1..21: mol_type = genomic RNA
acaaaagttactgcggttttg

SEQ ID NO: 3830 - RNA, 22 nt, Homo sapiens
  source 1..22: mol_type = genomic RNA
agccaaaaccgcaataactttt

SEQ ID NO: 3831 - RNA, 21 nt, Homo sapiens
  source 1..21: mol_type = genomic RNA
ctggtgcaaaagtaactgcca

SEQ ID NO: 3832 - RNA, 21 nt, Homo sapiens
  source 1..21: mol_type = genomic RNA
gcaaaaaccgcaattactttt

SEQ ID NO: 3833 - RNA, 20 nt, Homo sapiens
  source 1..20: mol_type = genomic RNA
gcaaaagtaactgcagtttt

SEQ ID NO: 3834 - RNA, 18 nt, Homo sapiens
  source 1..18: mol_type = genomic RNA
aaatccgcaagtactttt

SEQ ID NO: 3835 - RNA, 20 nt, Homo sapiens
  source 1..20: mol_type = genomic RNA
aaccgtgatgacttttgcac

SEQ ID NO: 3836 - RNA, 22 nt, Homo sapiens
  source 1..22: mol_type = genomic RNA
tgcaagagtaatcgcggttttg

SEQ ID NO: 3837 - RNA, 21 nt, Homo sapiens
  source 1..21: mol_type = genomic RNA
gcaaaaaccacaattactttt

SEQ ID NO: 3838 - RNA, 21 nt, Homo sapiens
  source 1..21: mol_type = genomic RNA
gcaaaagtgattgcagttttt

SEQ ID NO: 3839 - RNA, 22 nt, Homo sapiens
  source 1..22: mol_type = genomic RNA
gcaaaaaccacaatcacttttg

SEQ ID NO: 3840 - RNA, 22 nt, Homo sapiens
  source 1..22: mol_type = genomic RNA
acaaaagcaactgaggttcttg

SEQ ID NO: 3841 - RNA, 22 nt, Homo sapiens
  source 1..22: mol_type = genomic RNA
ggccaaaaccacaattactttt

SEQ ID NO: 3842 - RNA, 22 nt, Homo sapiens
  source 1..22: mol_type = genomic RNA
gcaaaagtaattgagatttttg

SEQ ID NO: 3843 - RNA, 22 nt, Homo sapiens
  source 1..22: mol_type = genomic RNA
ggcaaaaaccgcaattactttt

SEQ ID NO: 3844 - RNA, 22 nt, Homo sapiens
  source 1..22: mol_type = genomic RNA
gcaaaagaaactgtggtttttg

SEQ ID NO: 3845 - RNA, 22 nt, Homo sapiens
  source 1..22: mol_type = genomic RNA
ggcaaaaaccacaattactttt

SEQ ID NO: 3846 - RNA, 22 nt, Homo sapiens
  source 1..22: mol_type = genomic RNA
tgcaaaagtagtctcagttttt

SEQ ID NO: 3847 - RNA, 19 nt, Homo sapiens
  source 1..19: mol_type = genomic RNA
aaaagtaattacagttttt

SEQ ID NO: 3848 - RNA, 22 nt, Homo sapiens
  source 1..22: mol_type = genomic RNA
gtacaaaagtaattacagtttt

SEQ ID NO: 3849 - RNA, 23 nt, Homo sapiens
  source 1..23: mol_type = genomic RNA
caaaaactgcaattacttttgca

SEQ ID NO: 3850 - RNA, 23 nt, Homo sapiens
  source 1..23: mol_type = genomic RNA
tgcaaaagtaattgcggtttttg

SEQ ID NO: 3851 - RNA, 22 nt, Homo sapiens
  source 1..22: mol_type = genomic RNA
gacaaaaaccgcgattactttt

SEQ ID NO: 3852 - RNA, 22 nt, Homo sapiens
  source 1..22: mol_type = genomic RNA
ggcaaaatccgcaattactttt

SEQ ID NO: 3853 - RNA, 22 nt, Homo sapiens
  source 1..22: mol_type = genomic RNA
accaaagaccgcaattactttt

SEQ ID NO: 3854 - RNA, 22 nt, Homo sapiens
  source 1..22: mol_type = genomic RNA
agcaaaatccgcaagtactttt

SEQ ID NO: 3855 - RNA, 22 nt, Homo sapiens
  source 1..22: mol_type = genomic RNA
gacaaaacccgcaaatactttt

SEQ ID NO: 3856 - RNA, 21 nt, Homo sapiens
  source 1..21: mol_type = genomic RNA
caaaaaccacaaatacctttg

SEQ ID NO: 3857 - RNA, 22 nt, Homo sapiens
  source 1..22: mol_type = genomic RNA
acaaaatccacaattacttttg

SEQ ID NO: 3858 - RNA, 22 nt, Homo sapiens
  source 1..22: mol_type = genomic RNA
gcaaaagtaactgcagttttgg

SEQ ID NO: 3859 - RNA, 22 nt, Homo sapiens
  source 1..22: mol_type = genomic RNA
ggcaaaaaccgcaattactttt

SEQ ID NO: 3860 - RNA, 22 nt, Homo sapiens
  source 1..22: mol_type = genomic RNA
aaagtaactgcagtttttgcta

SEQ ID NO: 3861 - RNA, 22 nt, Homo sapiens
  source 1..22: mol_type = genomic RNA
ccgccattacttttgcaccagc

SEQ ID NO: 3862 - RNA, 23 nt, Homo sapiens
  source 1..23: mol_type = genomic RNA
aaaataactgcagttttggccat

SEQ ID NO: 3863 - RNA, 25 nt, Homo sapiens
  source 1..25: mol_type = genomic RNA
tggtgcaaaagtaattgtggttttt

SEQ ID NO: 3864 - RNA, 21 nt, Homo sapiens
  source 1..21: mol_type = genomic RNA
caaaaaccacgatcacttttg

SEQ ID NO: 3865 - RNA, 23 nt, Homo sapiens
  source 1..23: mol_type = genomic RNA
cgcaaaagtaattgcagtctttg

SEQ ID NO: 3866 - RNA, 23 nt, Homo sapiens
  source 1..23: mol_type = genomic RNA
aggcaaaaaccgcagttactttt

SEQ ID NO: 3867 - RNA, 22 nt, Homo sapiens
  source 1..22: mol_type = genomic RNA
ggcaaaaacagtgattactttt

SEQ ID NO: 3868 - RNA, 23 nt, Homo sapiens
  source 1..23: mol_type = genomic RNA
tgcaaaagtaattgcggtttttg

SEQ ID NO: 3869 - RNA, 21 nt, Homo sapiens
  source 1..21: mol_type = genomic RNA
agagctcatccatagttgtca

SEQ ID NO: 3870 - RNA, 20 nt, Homo sapiens
  source 1..20: mol_type = genomic RNA
ctcttactccctcaggcact

SEQ ID NO: 3871 - RNA, 22 nt, Homo sapiens
  source 1..22: mol_type = genomic RNA
atgtgcctgagggagtaagaca

SEQ ID NO: 3872 - RNA, 23 nt, Homo sapiens
  source 1..23: mol_type = genomic RNA
gggctcttactccctcaggcact

SEQ ID NO: 3873 - RNA, 22 nt, Homo sapiens
  source 1..22: mol_type = genomic RNA
tgtcttactccctcaggcacat

SEQ ID NO: 3874 - RNA, 20 nt, Homo sapiens
  source 1..20: mol_type = genomic RNA
cagtgcctgagggagtaaga

SEQ ID NO: 3875 - RNA, 21 nt, Homo sapiens
  source 1..21: mol_type = genomic RNA
tggaaaccaagagtgggtcgc

SEQ ID NO: 3876 - RNA, 21 nt, Homo sapiens
  source 1..21: mol_type = genomic RNA
ctgaaaccaagtatgggtcgc

SEQ ID NO: 3877 - RNA, 22 nt, Homo sapiens
  source 1..22: mol_type = genomic RNA
ggtctcacccacgcttgatttc

SEQ ID NO: 3878 - RNA, 21 nt, Homo sapiens
  source 1..21: mol_type = genomic RNA
ttgtctaaccagtcacctgtt

SEQ ID NO: 3879 - RNA, 21 nt, Homo sapiens
  source 1..21: mol_type = genomic RNA
aaaacaaaatctcaccgtttt

SEQ ID NO: 3880 - RNA, 21 nt, Homo sapiens
  source 1..21: mol_type = genomic RNA
actggctgagtcaggactagc

SEQ ID NO: 3881 - RNA, 21 nt, Homo sapiens
  source 1..21: mol_type = genomic RNA
atcagaggttcagcttaccct

SEQ ID NO: 3882 - RNA, 22 nt, Homo sapiens
  source 1..22: mol_type = genomic RNA
aaagatgagctaatggtaatat

SEQ ID NO: 3883 - RNA, 22 nt, Homo sapiens
  source 1..22: mol_type = genomic RNA
ctcatattacaatgagctcatc

SEQ ID NO: 3884 - RNA, 23 nt, Homo sapiens
  source 1..23: mol_type = genomic RNA
agacaaggcccacccgtgcaaac

SEQ ID NO: 3885 - RNA, 19 nt, Homo sapiens
  source 1..19: mol_type = genomic RNA
cagaggagcctcctaggac

SEQ ID NO: 3886 - RNA, 21 nt, Homo sapiens
  source 1..21: mol_type = genomic RNA
gggaggctcctttgagaattg

SEQ ID NO: 3887 - RNA, 21 nt, Homo sapiens
  source 1..21: mol_type = genomic RNA
agcagacccctgcaccccaac

SEQ ID NO: 3888 - RNA, 22 nt, Homo sapiens
  source 1..22: mol_type = genomic RNA
gatctggtactccttaagctaa

SEQ ID NO: 3889 - RNA, 21 nt, Homo sapiens
  source 1..21: mol_type = genomic RNA
gttagcttaaggagtaccata

SEQ ID NO: 3890 - RNA, 19 nt, Homo sapiens
  source 1..19: mol_type = genomic RNA
attttggtacagcagctca

SEQ ID NO: 3891 - RNA, 22 nt, Homo sapiens
  source 1..22: mol_type = genomic RNA
gtgctggctcacttcatatgtg

SEQ ID NO: 3892 - RNA, 22 nt, Homo sapiens
  source 1..22: mol_type = genomic RNA
acacatatgaaatgagccagca

SEQ ID NO: 3893 - RNA, 22 nt, Homo sapiens
  source 1..22: mol_type = genomic RNA
ggaacttctaggaggcatggaa

SEQ ID NO: 3894 - RNA, 22 nt, Homo sapiens
  source 1..22: mol_type = genomic RNA
tctccatttctcctggaaggct

SEQ ID NO: 3895 - RNA, 22 nt, Homo sapiens
  source 1..22: mol_type = genomic RNA
cctaggcacacttaaagtttta

SEQ ID NO: 3896 - RNA, 22 nt, Homo sapiens
  source 1..22: mol_type = genomic RNA
gctataactttaagtgtgccta

SEQ ID NO: 3897 - RNA, 22 nt, Homo sapiens
  source 1..22: mol_type = genomic RNA
ccaaactaatatacccatattc

SEQ ID NO: 3898 - RNA, 22 nt, Homo sapiens
  source 1..22: mol_type = genomic RNA
cagaatatgggtatattagttt

SEQ ID NO: 3899 - RNA, 22 nt, Homo sapiens
  source 1..22: mol_type = genomic RNA
aattgggcaaagggaagaacta

SEQ ID NO: 3900 - RNA, 22 nt, Homo sapiens
  source 1..22: mol_type = genomic RNA
tctagttcttcccatttccctg

SEQ ID NO: 3901 - RNA, 22 nt, Homo sapiens
  source 1..22: mol_type = genomic RNA
acctgtagtcccagctattcag

SEQ ID NO: 3902 - RNA, 22 nt, Homo sapiens
  source 1..22: mol_type = genomic RNA
ctctcgagtagctggtacttca

SEQ ID NO: 3903 - RNA, 22 nt, Homo sapiens
  source 1..22: mol_type = genomic RNA
ctttaaccagcttgtcactctg

SEQ ID NO: 3904 - RNA, 22 nt, Homo sapiens
  source 1..22: mol_type = genomic RNA
gcatatagtaacaagctggata

SEQ ID NO: 3905 - RNA, 21 nt, Homo sapiens
  source 1..21: mol_type = genomic RNA
gatgatcacactgcccggggc

SEQ ID NO: 3906 - RNA, 18 nt, Homo sapiens
  source 1..18: mol_type = genomic RNA
agtcccggaggtgaccat

SEQ ID NO: 3907 - RNA, 19 nt, Homo sapiens
  source 1..19: mol_type = genomic RNA
gctggcattagtgggactt

SEQ ID NO: 3908 - RNA, 21 nt, Homo sapiens
  source 1..21: mol_type = genomic RNA
aaaagtcccactaatgccagt

SEQ ID NO: 3909 - RNA, 23 nt, Homo sapiens
  source 1..23: mol_type = genomic RNA
tgggagctaggttgccatgtgca

SEQ ID NO: 3910 - RNA, 21 nt, Homo sapiens
  source 1..21: mol_type = genomic RNA
actgcacaagagcacccagcc

SEQ ID NO: 3911 - RNA, 21 nt, Homo sapiens
  source 1..21: mol_type = genomic RNA
ttttggtgcatatttacttta

SEQ ID NO: 3912 - RNA, 21 nt, Homo sapiens
  source 1..21: mol_type = genomic RNA
ttgccatacatgaactttatt

SEQ ID NO: 3913 - RNA, 21 nt, Homo sapiens
  source 1..21: mol_type = genomic RNA
aataaagtctatgtatggcaa

SEQ ID NO: 3914 - RNA, 21 nt, Homo sapiens
  source 1..21: mol_type = genomic RNA
tgggagctaagctatgggtat

SEQ ID NO: 3915 - RNA, 21 nt, Homo sapiens
  source 1..21: mol_type = genomic RNA
atacccatagcttagctccca

SEQ ID NO: 3916 - RNA, 22 nt, Homo sapiens
  source 1..22: mol_type = genomic RNA
acttcaaggatcttaaactttg

SEQ ID NO: 3917 - RNA, 22 nt, Homo sapiens
  source 1..22: mol_type = genomic RNA
ggcaaagtttaagatccttgat

SEQ ID NO: 3918 - RNA, 20 nt, Homo sapiens
  source 1..20: mol_type = genomic RNA
gcaaatggtacagctacttt

SEQ ID NO: 3919 - RNA, 19 nt, Homo sapiens
  source 1..19: mol_type = genomic RNA
gggaaacgtatgtcaacct

SEQ ID NO: 3920 - RNA, 19 nt, Homo sapiens
  source 1..19: mol_type = genomic RNA
gcctgctgacaccgtgcct

SEQ ID NO: 3921 - RNA, 19 nt, Homo sapiens
  source 1..19: mol_type = genomic RNA
gttgggatcacaggcgccc

SEQ ID NO: 3922 - RNA, 23 nt, Homo sapiens
  source 1..23: mol_type = genomic RNA
gttctgtcctggaagaacatact

SEQ ID NO: 3923 - RNA, 20 nt, Homo sapiens
  source 1..20: mol_type = genomic RNA
gtgtgtatacatttatacat

SEQ ID NO: 3924 - RNA, 22 nt, Homo sapiens
  source 1..22: mol_type = genomic RNA
gcagattagtccagcatttctc

SEQ ID NO: 3925 - RNA, 22 nt, Homo sapiens
  source 1..22: mol_type = genomic RNA
aagaggtattgccaccctttct

SEQ ID NO: 3926 - RNA, 22 nt, Homo sapiens
  source 1..22: mol_type = genomic RNA
actagaaagggtggcaatacct

SEQ ID NO: 3927 - RNA, 22 nt, Homo sapiens
  source 1..22: mol_type = genomic RNA
accttatcctgcaaggtgctac

SEQ ID NO: 3928 - RNA, 24 nt, Homo sapiens
  source 1..24: mol_type = genomic RNA
gaagtcagagaatctgcatctgta

SEQ ID NO: 3929 - RNA, 20 nt, Homo sapiens
  source 1..20: mol_type = genomic RNA
ctgttgctcaggctagagtt

SEQ ID NO: 3930 - RNA, 22 nt, Homo sapiens
  source 1..22: mol_type = genomic RNA
cccgtgataactgctgggctgt

SEQ ID NO: 3931 - RNA, 21 nt, Homo sapiens
  source 1..21: mol_type = genomic RNA
acaatacaatacgatacgata

SEQ ID NO: 3932 - RNA, 22 nt, Homo sapiens
  source 1..22: mol_type = genomic RNA
atttgaccctaaaacgttctaa

SEQ ID NO: 3933 - RNA, 22 nt, Homo sapiens
  source 1..22: mol_type = genomic RNA
gctgttttacaggtgtttgtta

SEQ ID NO: 3934 - RNA, 22 nt, Homo sapiens
  source 1..22: mol_type = genomic RNA
tctaggactacaggtgtatgct

SEQ ID NO: 3935 - RNA, 21 nt, Homo sapiens
  source 1..21: mol_type = genomic RNA
actttccaggattcattaact

SEQ ID NO: 3936 - RNA, 21 nt, Homo sapiens
  source 1..21: mol_type = genomic RNA
cctaatagaggtagtagctga

SEQ ID NO: 3937 - RNA, 22 nt, Homo sapiens
  source 1..22: mol_type = genomic RNA
gctttctcggagctcagagcaa

SEQ ID NO: 3938 - RNA, 22 nt, Homo sapiens
  source 1..22: mol_type = genomic RNA
acacccactgtggtattatttg

SEQ ID NO: 3939 - RNA, 20 nt, Homo sapiens
  source 1..20: mol_type = genomic RNA
acacctactgtgatattatt

SEQ ID NO: 3940 - RNA, 22 nt, Homo sapiens
  source 1..22: mol_type = genomic RNA
gtacacctactgtgatattatt

SEQ ID NO: 3941 - RNA, 22 nt, Homo sapiens
  source 1..22: mol_type = genomic RNA
gagttcatttcagagccactgc

SEQ ID NO: 3942 - RNA, 21 nt, Homo sapiens
  source 1..21: mol_type = genomic RNA
ctgagacagtcccatgatctg

SEQ ID NO: 3943 - RNA, 22 nt, Homo sapiens
  source 1..22: mol_type = genomic RNA
ctgtctagattcttcttggagt

SEQ ID NO: 3944 - RNA, 22 nt, Homo sapiens
  source 1..22: mol_type = genomic RNA
ggcatcagactacttaaatgag

SEQ ID NO: 3945 - RNA, 22 nt, Homo sapiens
  source 1..22: mol_type = genomic RNA
cctttatcatgaaactacttga

SEQ ID NO: 3946 - RNA, 22 nt, Homo sapiens
  source 1..22: mol_type = genomic RNA
ccacaatcactgcactccccca

SEQ ID NO: 3947 - RNA, 22 nt, Homo sapiens
  source 1..22: mol_type = genomic RNA
gctccaacaaggaaagacagga

SEQ ID NO: 3948 - RNA, 22 nt, Homo sapiens
  source 1..22: mol_type = genomic RNA
ccttcaataatttaatgcatta

SEQ ID NO: 3949 - RNA, 19 nt, Homo sapiens
  source 1..19: mol_type = genomic RNA
aatcagaacgtgacaataa

SEQ ID NO: 3950 - RNA, 22 nt, Homo sapiens
  source 1..22: mol_type = genomic RNA
catgggatatgttgctgactca

SEQ ID NO: 3951 - RNA, 18 nt, Homo sapiens
  source 1..18: mol_type = genomic RNA
accttcccgacttctcct

SEQ ID NO: 3952 - RNA, 22 nt, Homo sapiens
  source 1..22: mol_type = genomic RNA
gcaaaggtaattgctgttttcg

SEQ ID NO: 3953 - RNA, 22 nt, Homo sapiens
  source 1..22: mol_type = genomic RNA
gcataatgggatgatggcctaa

SEQ ID NO: 3954 - RNA, 23 nt, Homo sapiens
  source 1..23: mol_type = genomic RNA
cacaggccatgagccccgaaaca

SEQ ID NO: 3955 - RNA, 22 nt, Homo sapiens
  source 1..22: mol_type = genomic RNA
gggaaaaactgcaattaccttt

SEQ ID NO: 3956 - RNA, 22 nt, Homo sapiens
  source 1..22: mol_type = genomic RNA
agcttcagcatgttatccagaa

SEQ ID NO: 3957 - RNA, 22 nt, Homo sapiens
  source 1..22: mol_type = genomic RNA
gccttgtacagcattcaaacgt

SEQ ID NO: 3958 - RNA, 20 nt, Homo sapiens
  source 1..20: mol_type = genomic RNA
ggtcaggcacagtcgctcat

SEQ ID NO: 3959 - RNA, 21 nt, Homo sapiens
  source 1..21: mol_type = genomic RNA
ctcactcagatggccaactca

SEQ ID NO: 3960 - RNA, 20 nt, Homo sapiens
  source 1..20: mol_type = genomic RNA
tgggccaccgccgagcggac

SEQ ID NO: 3961 - RNA, 24 nt, Homo sapiens
  source 1..24: mol_type = genomic RNA
ctgatcagttacacatcacttcag

SEQ ID NO: 3962 - RNA, 20 nt, Homo sapiens
  source 1..20: mol_type = genomic RNA
gctccccattctctctccgc

SEQ ID NO: 3963 - RNA, 22 nt, Homo sapiens
  source 1..22: mol_type = genomic RNA
tgtgggtgtgtgcatgagcgtg

SEQ ID NO: 3964 - RNA, 23 nt, Homo sapiens
  source 1..23: mol_type = genomic RNA
acacactcacacacacacactca

SEQ ID NO: 3965 - RNA, 19 nt, Homo sapiens
  source 1..19: mol_type = genomic RNA
gctcctgtccaactggctc

SEQ ID NO: 3966 - RNA, 22 nt, Homo sapiens
  source 1..22: mol_type = genomic RNA
gattccaatttttccacatctt

SEQ ID NO: 3967 - RNA, 22 nt, Homo sapiens
  source 1..22: mol_type = genomic RNA
aaagacgtggagaaattagaat

SEQ ID NO: 3968 - RNA, 21 nt, Homo sapiens
  source 1..21: mol_type = genomic RNA
caggtaccaatattttatcta

SEQ ID NO: 3969 - RNA, 21 nt, Homo sapiens
  source 1..21: mol_type = genomic RNA
acaatcctagagcacaagaag

SEQ ID NO: 3970 - RNA, 20 nt, Homo sapiens
  source 1..20: mol_type = genomic RNA
acctccccgcgccccagccc

SEQ ID NO: 3971 - RNA, 23 nt, Homo sapiens
  source 1..23: mol_type = genomic RNA
aatcgcggtttataccaaatgaa

SEQ ID NO: 3972 - RNA, 22 nt, Homo sapiens
  source 1..22: mol_type = genomic RNA
cctaatgattcatcattctcaa

SEQ ID NO: 3973 - RNA, 21 nt, Homo sapiens
  source 1..21: mol_type = genomic RNA
actgatctagagaacacaaga

SEQ ID NO: 3974 - RNA, 22 nt, Homo sapiens
  source 1..22: mol_type = genomic RNA
ggttcagttgttcaaccagtta

SEQ ID NO: 3975 - RNA, 23 nt, Homo sapiens
  source 1..23: mol_type = genomic RNA
agtaactggttgaacaactgtaa

SEQ ID NO: 3976 - RNA, 21 nt, Homo sapiens
  source 1..21: mol_type = genomic RNA
gtaatgggaccttcctctttg

SEQ ID NO: 3977 - RNA, 22 nt, Homo sapiens
  source 1..22: mol_type = genomic RNA
agcctggttggcctggaactga

SEQ ID NO: 3978 - RNA, 22 nt, Homo sapiens
  source 1..22: mol_type = genomic RNA
ctcagtcccaggcaaaccataa

SEQ ID NO: 3979 - RNA, 19 nt, Homo sapiens
  source 1..19: mol_type = genomic RNA
tagcatacagatacgccca

SEQ ID NO: 3980 - RNA, 22 nt, Homo sapiens
  source 1..22: mol_type = genomic RNA
ggacctaaaaatacaatgcata

SEQ ID NO: 3981 - RNA, 21 nt, Homo sapiens
  source 1..21: mol_type = genomic RNA
gtgactcatcacctatggaaa

SEQ ID NO: 3982 - RNA, 21 nt, Homo sapiens
  source 1..21: mol_type = genomic RNA
gttctaacccattgtggccaa

SEQ ID NO: 3983 - RNA, 24 nt, Homo sapiens
  source 1..24: mol_type = genomic RNA
tctgggaaccggcatttgttctga

SEQ ID NO: 3984 - RNA, 22 nt, Homo sapiens
  source 1..22: mol_type = genomic RNA
ctcagagcagacgtggttctca

SEQ ID NO: 3985 - RNA, 21 nt, Homo sapiens
  source 1..21: mol_type = genomic RNA
actagcttatacataaaatta

SEQ ID NO: 3986 - RNA, 22 nt, Homo sapiens
  source 1..22: mol_type = genomic RNA
ctgcacttttatgaataagctc

SEQ ID NO: 3987 - RNA, 20 nt, Homo sapiens
  source 1..20: mol_type = genomic RNA
acaatgagaacccatggtct

SEQ ID NO: 3988 - RNA, 22 nt, Homo sapiens
  source 1..22: mol_type = genomic RNA
acatcatcgcatattgacacaa

SEQ ID NO: 3989 - RNA, 19 nt, Homo sapiens
  source 1..19: mol_type = genomic RNA
agaaaccccagcagagaca

SEQ ID NO: 3990 - RNA, 25 nt, Homo sapiens
  source 1..25: mol_type = genomic RNA
gctgagcaatgcctggctggtgcct

SEQ ID NO: 3991 - RNA, 21 nt, Homo sapiens
  source 1..21: mol_type = genomic RNA
agacacaccacggcacacttc

SEQ ID NO: 3992 - RNA, 21 nt, Homo sapiens
  source 1..21: mol_type = genomic RNA
cccgaggagccgggcaggctt

SEQ ID NO: 3993 - RNA, 22 nt, Homo sapiens
  source 1..22: mol_type = genomic RNA
acagtggtcatcgagtgacaca

SEQ ID NO: 3994 - RNA, 22 nt, Homo sapiens
  source 1..22: mol_type = genomic RNA
tgacgatgacaacgatgacgta

SEQ ID NO: 3995 - RNA, 20 nt, Homo sapiens
  source 1..20: mol_type = genomic RNA
gtttgataaactgacacaac

SEQ ID NO: 3996 - RNA, 23 nt, Homo sapiens
  source 1..23: mol_type = genomic RNA
gagcaaggctcttgtctgtaagt

SEQ ID NO: 3997 - RNA, 22 nt, Homo sapiens
  source 1..22: mol_type = genomic RNA
ctcctccaacaatcctagacca

SEQ ID NO: 3998 - RNA, 23 nt, Homo sapiens
  source 1..23: mol_type = genomic RNA
gggccgcagctgtcgcccgtgtc

SEQ ID NO: 3999 - RNA, 22 nt, Homo sapiens
  source 1..22: mol_type = genomic RNA
gcaaaagtaattgcagtgtgtg

SEQ ID NO: 4000 - RNA, 19 nt, Homo sapiens
  source 1..19: mol_type = genomic RNA
gtcctgaattccgcagcct

SEQ ID NO: 4001 - RNA, 23 nt, Homo sapiens
  source 1..23: mol_type = genomic RNA
aggagaaggcaccatgggattta

SEQ ID NO: 4002 - RNA, 21 nt, Homo sapiens
  source 1..21: mol_type = genomic RNA
atctttgattttcagtagttt

SEQ ID NO: 4003 - RNA, 21 nt, Homo sapiens
  source 1..21: mol_type = genomic RNA
ccaccgccggagactcgcagg

SEQ ID NO: 4004 - RNA, 21 nt, Homo sapiens
  source 1..21: mol_type = genomic RNA
gggggcagcaggccctagccc

SEQ ID NO: 4005 - RNA, 21 nt, Homo sapiens
  source 1..21: mol_type = genomic RNA
gttatagatctggatttgaac

SEQ ID NO: 4006 - RNA, 19 nt, Homo sapiens
  source 1..19: mol_type = genomic RNA
ctccagggactggaaccgg

SEQ ID NO: 4007 - RNA, 19 nt, Homo sapiens
  source 1..19: mol_type = genomic RNA
gccttggccggcagcagaa

SEQ ID NO: 4008 - RNA, 22 nt, Homo sapiens
  source 1..22: mol_type = genomic RNA
ctaaggtgcagtgtgatgagga

SEQ ID NO: 4009 - RNA, 20 nt, Homo sapiens
  source 1..20: mol_type = genomic RNA
gtagctgataactcactacc

SEQ ID NO: 4010 - RNA, 20 nt, Homo sapiens
  source 1..20: mol_type = genomic RNA
ccacctagcctctgaatatc

SEQ ID NO: 4011 - RNA, 21 nt, Homo sapiens
  source 1..21: mol_type = genomic RNA
caccaatgccgcctgggccgt

SEQ ID NO: 4012 - RNA, 21 nt, Homo sapiens
  source 1..21: mol_type = genomic RNA
ccacctctcctctgtcatgct

SEQ ID NO: 4013 - RNA, 21 nt, Homo sapiens
  source 1..21: mol_type = genomic RNA
gaaggccgtacagctcttccc

SEQ ID NO: 4014 - RNA, 19 nt, Homo sapiens
  source 1..19: mol_type = genomic RNA
ccacagctagctcaggcgg

SEQ ID NO: 4015 - RNA, 24 nt, Homo sapiens
  source 1..24: mol_type = genomic RNA
cagctagttggtccaagcttccaa

SEQ ID NO: 4016 - RNA, 25 nt, Homo sapiens
  source 1..25: mol_type = genomic RNA
acggagctgtcccaacaccacccct

SEQ ID NO: 4017 - RNA, 19 nt, Homo sapiens
  source 1..19: mol_type = genomic RNA
cgggaacgcccgcactaga

SEQ ID NO: 4018 - RNA, 24 nt, Homo sapiens
  source 1..24: mol_type = genomic RNA
ggcgccttggccggcactgctcct

SEQ ID NO: 4019 - RNA, 19 nt, Homo sapiens
  source 1..19: mol_type = genomic RNA
ggatcaaccagacgtattc

SEQ ID NO: 4020 - RNA, 20 nt, Homo sapiens
  source 1..20: mol_type = genomic RNA
cccacagcctctgatataag

SEQ ID NO: 4021 - RNA, 20 nt, Homo sapiens
  source 1..20: mol_type = genomic RNA
ccggccaccgactggcggaa

SEQ ID NO: 4022 - RNA, 19 nt, Homo sapiens
  source 1..19: mol_type = genomic RNA
tgtgctcccccagcccctt

SEQ ID NO: 4023 - RNA, 20 nt, Homo sapiens
  source 1..20: mol_type = genomic RNA
ctctgcccttcccaacctcc

SEQ ID NO: 4024 - RNA, 18 nt, Homo sapiens
  source 1..18: mol_type = genomic RNA
gctcgcccccccgcctca

SEQ ID NO: 4025 - RNA, 20 nt, Homo sapiens
  source 1..20: mol_type = genomic RNA
cgcccccccgcttcatctct

SEQ ID NO: 4026 - RNA, 24 nt, Homo sapiens
  source 1..24: mol_type = genomic RNA
ccgccccgccccaccccggcctcc

SEQ ID NO: 4027 - RNA, 20 nt, Homo sapiens
  source 1..20: mol_type = genomic RNA
agagatgagagaaacaccct

SEQ ID NO: 4028 - RNA, 19 nt, Homo sapiens
  source 1..19: mol_type = genomic RNA
gccccgcccctcgctcccc

SEQ ID NO: 4029 - RNA, 21 nt, Homo sapiens
  source 1..21: mol_type = genomic RNA
tcccagcacacatttagctca

SEQ ID NO: 4030 - RNA, 23 nt, Homo sapiens
  source 1..23: mol_type = genomic RNA
gtcagaccccgaggggtcctcgc

SEQ ID NO: 4031 - RNA, 25 nt, Homo sapiens
  source 1..25: mol_type = genomic RNA
aaggagctcagaagccctgcccagc

SEQ ID NO: 4032 - RNA, 20 nt, Homo sapiens
  source 1..20: mol_type = genomic RNA
tcctcccccttccttttccc

SEQ ID NO: 4033 - RNA, 20 nt, Homo sapiens
  source 1..20: mol_type = genomic RNA
tccgccgctccgccttccgc

SEQ ID NO: 4034 - RNA, 18 nt, Homo sapiens
  source 1..18: mol_type = genomic RNA
tctccgccgggccttcac

SEQ ID NO: 4035 - RNA, 19 nt, Homo sapiens
  source 1..19: mol_type = genomic RNA
cctcccacccactccctca

SEQ ID NO: 4036 - RNA, 19 nt, Homo sapiens
  source 1..19: mol_type = genomic RNA
ttttgactccaattccagt

SEQ ID NO: 4037 - RNA, 19 nt, Homo sapiens
  source 1..19: mol_type = genomic RNA
tatacacccaactccctca

SEQ ID NO: 4038 - RNA, 20 nt, Homo sapiens
  source 1..20: mol_type = genomic RNA
ggcaaagaaggaacattcct

SEQ ID NO: 4039 - RNA, 19 nt, Homo sapiens
  source 1..19: mol_type = genomic RNA
catacaatccactccctca

SEQ ID NO: 4040 - RNA, 19 nt, Homo sapiens
  source 1..19: mol_type = genomic RNA
cactcccatctgaccagcc

SEQ ID NO: 4041 - RNA, 19 nt, Homo sapiens
  source 1..19: mol_type = genomic RNA
tgcaatccccagccctgct

SEQ ID NO: 4042 - RNA, 19 nt, Homo sapiens
  source 1..19: mol_type = genomic RNA
tacccaacctcctccctca

SEQ ID NO: 4043 - RNA, 19 nt, Homo sapiens
  source 1..19: mol_type = genomic RNA
tctacatcctaccacctca

SEQ ID NO: 4044 - RNA, 23 nt, Homo sapiens
  source 1..23: mol_type = genomic RNA
ccacctggcaagaacaggcgttc

SEQ ID NO: 4045 - RNA, 22 nt, Homo sapiens
  source 1..22: mol_type = genomic RNA
aagagggagacccaggctcgga

SEQ ID NO: 4046 - RNA, 22 nt, Homo sapiens
  source 1..22: mol_type = genomic RNA
gatccgagcaccggggaccccc

SEQ ID NO: 4047 - RNA, 22 nt, Homo sapiens
  source 1..22: mol_type = genomic RNA
ctgctcaaaccctccaatgact

SEQ ID NO: 4048 - RNA, 19 nt, Homo sapiens
  source 1..19: mol_type = genomic RNA
ctcccctcacctcctgctg

SEQ ID NO: 4049 - RNA, 22 nt, Homo sapiens
  source 1..22: mol_type = genomic RNA
aagtcactgaagggttttgagt

SEQ ID NO: 4050 - RNA, 22 nt, Homo sapiens
  source 1..22: mol_type = genomic RNA
gccaccttcaaatgggaagtct

SEQ ID NO: 4051 - RNA, 23 nt, Homo sapiens
  source 1..23: mol_type = genomic RNA
actcagaaggacaagtagagttt

SEQ ID NO: 4052 - RNA, 24 nt, Homo sapiens
  source 1..24: mol_type = genomic RNA
actgggcacaaacatgtccaggtc

SEQ ID NO: 4053 - RNA, 20 nt, Homo sapiens
  source 1..20: mol_type = genomic RNA
atttctatatctatctccat

SEQ ID NO: 4054 - RNA, 21 nt, Homo sapiens
  source 1..21: mol_type = genomic RNA
aggtaagcgctgttgctagcc

SEQ ID NO: 4055 - RNA, 21 nt, Homo sapiens
  source 1..21: mol_type = genomic RNA
gctccaacctcagcagactgt

SEQ ID NO: 4056 - RNA, 23 nt, Homo sapiens
  source 1..23: mol_type = genomic RNA
acccaacagcccctgcaagggat

SEQ ID NO: 4057 - RNA, 21 nt, Homo sapiens
  source 1..21: mol_type = genomic RNA
aggtaataccaataccttgtg

SEQ ID NO: 4058 - RNA, 22 nt, Homo sapiens
  source 1..22: mol_type = genomic RNA
tgaacacaaggtactggtacta

SEQ ID NO: 4059 - RNA, 22 nt, Homo sapiens
  source 1..22: mol_type = genomic RNA
tgagggggaaagttctatagtc

SEQ ID NO: 4060 - RNA, 21 nt, Homo sapiens
  source 1..21: mol_type = genomic RNA
ggactatagaactttccccct

SEQ ID NO: 4061 - RNA, 19 nt, Homo sapiens
  source 1..19: mol_type = genomic RNA
aagacattttcagacagct

SEQ ID NO: 4062 - RNA, 22 nt, Homo sapiens
  source 1..22: mol_type = genomic RNA
tcctcttttcttagagactcac

SEQ ID NO: 4063 - RNA, 21 nt, Homo sapiens
  source 1..21: mol_type = genomic RNA
tcgactgccactcttactaga

SEQ ID NO: 4064 - RNA, 22 nt, Homo sapiens
  source 1..22: mol_type = genomic RNA
cctctagtaaatatgtcagcat

SEQ ID NO: 4065 - RNA, 22 nt, Homo sapiens
  source 1..22: mol_type = genomic RNA
gctgggcttacgttgggagaac

SEQ ID NO: 4066 - RNA, 21 nt, Homo sapiens
  source 1..21: mol_type = genomic RNA
agttctcccaacgtaaaccca

SEQ ID NO: 4067 - RNA, 22 nt, Homo sapiens
  source 1..22: mol_type = genomic RNA
accttccctggtacagaatact

SEQ ID NO: 4068 - RNA, 21 nt, Homo sapiens
  source 1..21: mol_type = genomic RNA
gctgaggtctgggccaggtct

SEQ ID NO: 4069 - RNA, 19 nt, Homo sapiens
  source 1..19: mol_type = genomic RNA
tcccacaggaagcagacac

SEQ ID NO: 4070 - RNA, 23 nt, Homo sapiens
  source 1..23: mol_type = genomic RNA
tttattgtggtagatactattag

SEQ ID NO: 4071 - RNA, 22 nt, Homo sapiens
  source 1..22: mol_type = genomic RNA
gtccaaagttggggtgctggtt

SEQ ID NO: 4072 - RNA, 23 nt, Homo sapiens
  source 1..23: mol_type = genomic RNA
ggacattgtttcagtgcccaagt

SEQ ID NO: 4073 - RNA, 23 nt, Homo sapiens
  source 1..23: mol_type = genomic RNA
tgcgggcgggacgagcaagcaca

SEQ ID NO: 4074 - RNA, 24 nt, Homo sapiens
  source 1..24: mol_type = genomic RNA
acgcagagcccgaaagcccccagt

SEQ ID NO: 4075 - RNA, 25 nt, Homo sapiens
  source 1..25: mol_type = genomic RNA
aggccgccacccgcccgcgatccct

SEQ ID NO: 4076 - RNA, 23 nt, Homo sapiens
  source 1..23: mol_type = genomic RNA
acagcgctcgcaaccgcagcgat

SEQ ID NO: 4077 - RNA, 21 nt, Homo sapiens
  source 1..21: mol_type = genomic RNA
agaggcaggttcctggatcat

SEQ ID NO: 4078 - RNA, 24 nt, Homo sapiens
  source 1..24: mol_type = genomic RNA
gaggtgactctatcctatgtcttt

SEQ ID NO: 4079 - RNA, 22 nt, Homo sapiens
  source 1..22: mol_type = genomic RNA
ggttccctctccaaatgtgtct

SEQ ID NO: 4080 - RNA, 22 nt, Homo sapiens
  source 1..22: mol_type = genomic RNA
caagacacatttggagagggac

SEQ ID NO: 4081 - RNA, 22 nt, Homo sapiens
  source 1..22: mol_type = genomic RNA
gggtccctctccaaatgtgtct

SEQ ID NO: 4082 - RNA, 22 nt, Homo sapiens
  source 1..22: mol_type = genomic RNA
agacacatttggagagggaacc

SEQ ID NO: 4083 - RNA, 22 nt, Homo sapiens
  source 1..22: mol_type = genomic RNA
ctacctgagctagcatacaagt

SEQ ID NO: 4084 - RNA, 19 nt, Homo sapiens
  source 1..19: mol_type = genomic RNA
gctctaagaaagccacact

SEQ ID NO: 4085 - RNA, 19 nt, Homo sapiens
  source 1..19: mol_type = genomic RNA
tcagcagtaccagcctaga

SEQ ID NO: 4086 - RNA, 19 nt, Homo sapiens
  source 1..19: mol_type = genomic RNA
gcctcagaggcagctgctt

SEQ ID NO: 4087 - RNA, 21 nt, Homo sapiens
  source 1..21: mol_type = genomic RNA
gaaggaagtgagtgcagccac

SEQ ID NO: 4088 - RNA, 19 nt, Homo sapiens
  source 1..19: mol_type = genomic RNA
accagtgccctgcacactt

SEQ ID NO: 4089 - RNA, 22 nt, Homo sapiens
  source 1..22: mol_type = genomic RNA
gactcttgaacaacacaggttt

SEQ ID NO: 4090 - RNA, 22 nt, Homo sapiens
  source 1..22: mol_type = genomic RNA
tgtgggcaaaacaaacactgct

SEQ ID NO: 4091 - RNA, 22 nt, Homo sapiens
  source 1..22: mol_type = genomic RNA
actgcagtgctcttgcgcccga

SEQ ID NO: 4092 - RNA, 21 nt, Homo sapiens
  source 1..21: mol_type = genomic RNA
gtcctgagagcgctgcctcct

SEQ ID NO: 4093 - RNA, 21 nt, Homo sapiens
  source 1..21: mol_type = genomic RNA
gcaggtcatcccaacaagtgt

SEQ ID NO: 4094 - RNA, 24 nt, Homo sapiens
  source 1..24: mol_type = genomic RNA
ggacacctggagtggatagctcct

SEQ ID NO: 4095 - RNA, 23 nt, Homo sapiens
  source 1..23: mol_type = genomic RNA
actgttaccgcaggctgctctgg

SEQ ID NO: 4096 - RNA, 22 nt, Homo sapiens
  source 1..22: mol_type = genomic RNA
accaaaggcagccctggcaact

SEQ ID NO: 4097 - RNA, 21 nt, Homo sapiens
  source 1..21: mol_type = genomic RNA
atactctagaaagatggtcta

SEQ ID NO: 4098 - RNA, 22 nt, Homo sapiens
  source 1..22: mol_type = genomic RNA
ggtcaacaatctttctagagct

SEQ ID NO: 4099 - RNA, 21 nt, Homo sapiens
  source 1..21: mol_type = genomic RNA
ggaggtctgcatcctagtccc

SEQ ID NO: 4100 - RNA, 23 nt, Homo sapiens
  source 1..23: mol_type = genomic RNA
tctggggatttgaatgcagacct

SEQ ID NO: 4101 - RNA, 20 nt, Homo sapiens
  source 1..20: mol_type = genomic RNA
agaatggctgtgctgtaatg

SEQ ID NO: 4102 - RNA, 21 nt, Homo sapiens
  source 1..21: mol_type = genomic RNA
ctgcattacagcacagccaga

SEQ ID NO: 4103 - RNA, 21 nt, Homo sapiens
  source 1..21: mol_type = genomic RNA
ctttggaagaggtagaagtca

SEQ ID NO: 4104 - RNA, 22 nt, Homo sapiens
  source 1..22: mol_type = genomic RNA
gctgagatatcccctattccaa

SEQ ID NO: 4105 - RNA, 22 nt, Homo sapiens
  source 1..22: mol_type = genomic RNA
gtgtctggaatctctgatacga

SEQ ID NO: 4106 - RNA, 23 nt, Homo sapiens
  source 1..23: mol_type = genomic RNA
accatattcagtgacatcccagt

SEQ ID NO: 4107 - RNA, 22 nt, Homo sapiens
  source 1..22: mol_type = genomic RNA
gggaaaaataggaaggactttg

SEQ ID NO: 4108 - RNA, 21 nt, Homo sapiens
  source 1..21: mol_type = genomic RNA
acaaagtccctcctattcttc

SEQ ID NO: 4109 - RNA, 22 nt, Homo sapiens
  source 1..22: mol_type = genomic RNA
agttctagaaatgcatggccca

SEQ ID NO: 4110 - RNA, 21 nt, Homo sapiens
  source 1..21: mol_type = genomic RNA
ggtgggtcatgcatttctaga

SEQ ID NO: 4111 - RNA, 22 nt, Homo sapiens
  source 1..22: mol_type = genomic RNA
aaattaggtagtggcagtggaa

SEQ ID NO: 4112 - RNA, 21 nt, Homo sapiens
  source 1..21: mol_type = genomic RNA
gttccactgccactacctaat

SEQ ID NO: 4113 - RNA, 22 nt, Homo sapiens
  source 1..22: mol_type = genomic RNA
caaaagtcaagcttatcctaaa

SEQ ID NO: 4114 - RNA, 21 nt, Homo sapiens
  source 1..21: mol_type = genomic RNA
ctgcaggagacagagtcggtg

SEQ ID NO: 4115 - RNA, 22 nt, Homo sapiens
  source 1..22: mol_type = genomic RNA
gactcctctctctcccctgctg

SEQ ID NO: 4116 - RNA, 22 nt, Homo sapiens
  source 1..22: mol_type = genomic RNA
gcaggcagaagggatggtgagg

SEQ ID NO: 4117 - RNA, 23 nt, Homo sapiens
  source 1..23: mol_type = genomic RNA
cctgtcagccccacttctgcctg

SEQ ID NO: 4118 - RNA, 23 nt, Homo sapiens
  source 1..23: mol_type = genomic RNA
tgcaggcagaaggggtggtgagg

SEQ ID NO: 4119 - RNA, 24 nt, Homo sapiens
  source 1..24: mol_type = genomic RNA
tgtcagccccacttctgcctgcag

SEQ ID NO: 4120 - RNA, 22 nt, Homo sapiens
  source 1..22: mol_type = genomic RNA
cctaccattagaagggctggaa

SEQ ID NO: 4121 - RNA, 22 nt, Homo sapiens
  source 1..22: mol_type = genomic RNA
tcttccagctcttctaatggta

SEQ ID NO: 4122 - RNA, 21 nt, Homo sapiens
  source 1..21: mol_type = genomic RNA
ctagggacagatgacacttga

SEQ ID NO: 4123 - RNA, 23 nt, Homo sapiens
  source 1..23: mol_type = genomic RNA
agacatgtggcgtcaatcccaaa

SEQ ID NO: 4124 - RNA, 21 nt, Homo sapiens
  source 1..21: mol_type = genomic RNA
ctggagtggaagaacaggcag

SEQ ID NO: 4125 - RNA, 23 nt, Homo sapiens
  source 1..23: mol_type = genomic RNA
gccagctgaaagtccactccata

SEQ ID NO: 4126 - RNA, 20 nt, Homo sapiens
  source 1..20: mol_type = genomic RNA
ctggggggtagatgaagaga

SEQ ID NO: 4127 - RNA, 21 nt, Homo sapiens
  source 1..21: mol_type = genomic RNA
gatgtcttccacaccctccaa

SEQ ID NO: 4128 - RNA, 21 nt, Homo sapiens
  source 1..21: mol_type = genomic RNA
cacaaccctagtggcgccatt

SEQ ID NO: 4129 - RNA, 25 nt, Homo sapiens
  source 1..25: mol_type = genomic RNA
tgaatggcaccctctcctagggttg

SEQ ID NO: 4130 - RNA, 21 nt, Homo sapiens
  source 1..21: mol_type = genomic RNA
cagtagagattgtttcaacac

SEQ ID NO: 4131 - RNA, 22 nt, Homo sapiens
  source 1..22: mol_type = genomic RNA
aaggtgatggtcagcagacata

SEQ ID NO: 4132 - RNA, 22 nt, Homo sapiens
  source 1..22: mol_type = genomic RNA
gcacatgttctgcggcccacca

SEQ ID NO: 4133 - RNA, 22 nt, Homo sapiens
  source 1..22: mol_type = genomic RNA
aaagaggttaaccatgtattat

SEQ ID NO: 4134 - RNA, 21 nt, Homo sapiens
  source 1..21: mol_type = genomic RNA
agaggttgactgtataatatt

SEQ ID NO: 4135 - RNA, 23 nt, Homo sapiens
  source 1..23: mol_type = genomic RNA
cctagagagggtgagaacctgcc

SEQ ID NO: 4136 - RNA, 25 nt, Homo sapiens
  source 1..25: mol_type = genomic RNA
accaacggacctacttccctccgcc

SEQ ID NO: 4137 - RNA, 22 nt, Homo sapiens
  source 1..22: mol_type = genomic RNA
tggggaccctccctgaaccaag

SEQ ID NO: 4138 - RNA, 22 nt, Homo sapiens
  source 1..22: mol_type = genomic RNA
tccttggttcagggaaggtcct

SEQ ID NO: 4139 - RNA, 21 nt, Homo sapiens
  source 1..21: mol_type = genomic RNA
taatccatgcacacaggaggt

SEQ ID NO: 4140 - RNA, 22 nt, Homo sapiens
  source 1..22: mol_type = genomic RNA
caactccgatatgcaatgggta

SEQ ID NO: 4141 - RNA, 24 nt, Homo sapiens
  source 1..24: mol_type = genomic RNA
acgcgcaggccagagacccaggca

SEQ ID NO: 4142 - RNA, 21 nt, Homo sapiens
  source 1..21: mol_type = genomic RNA
ctgctgggccacaacgtggga

SEQ ID NO: 4143 - RNA, 22 nt, Homo sapiens
  source 1..22: mol_type = genomic RNA
gcggtcccgcggcgccccgcct

SEQ ID NO: 4144 - RNA, 22 nt, Homo sapiens
  source 1..22: mol_type = genomic RNA
cctcaggcacggccgggccacc

SEQ ID NO: 4145 - RNA, 23 nt, Homo sapiens
  source 1..23: mol_type = genomic RNA
tgtaggctggggataaatgaata

SEQ ID NO: 4146 - RNA, 24 nt, Homo sapiens
  source 1..24: mol_type = genomic RNA
atccaatcattttccctagccagt

SEQ ID NO: 4147 - RNA, 22 nt, Homo sapiens
  source 1..22: mol_type = genomic RNA
tgtaggctgggaggcaaatgaa

SEQ ID NO: 4148 - RNA, 24 nt, Homo sapiens
  source 1..24: mol_type = genomic RNA
tacccaatcatctcccttagccca

SEQ ID NO: 4149 - RNA, 20 nt, Homo sapiens
  source 1..20: mol_type = genomic RNA
aggggcctcagcctcctggt

SEQ ID NO: 4150 - RNA, 23 nt, Homo sapiens
  source 1..23: mol_type = genomic RNA
gtagtgggccgagccgagtgaca

SEQ ID NO: 4151 - RNA, 20 nt, Homo sapiens
  source 1..20: mol_type = genomic RNA
caccacatacactcagggac

SEQ ID NO: 4152 - RNA, 21 nt, Homo sapiens
  source 1..21: mol_type = genomic RNA
ggtggagccctgagaaccgga

SEQ ID NO: 4153 - RNA, 21 nt, Homo sapiens
  source 1..21: mol_type = genomic RNA
ccacaggcacgactggtttgg

SEQ ID NO: 4154 - RNA, 22 nt, Homo sapiens
  source 1..22: mol_type = genomic RNA
ccacaggcacagccggtttgag

SEQ ID NO: 4155 - RNA, 21 nt, Homo sapiens
  source 1..21: mol_type = genomic RNA
tgccaaaccagtcgtgcctgt

SEQ ID NO: 4156 - RNA, 23 nt, Homo sapiens
  source 1..23: mol_type = genomic RNA
ctccagcccctccagggcttcct

SEQ ID NO: 4157 - RNA, 22 nt, Homo sapiens
  source 1..22: mol_type = genomic RNA
gcagaggaatggagagttcgga

SEQ ID NO: 4158 - RNA, 20 nt, Homo sapiens
  source 1..20: mol_type = genomic RNA
ggcccttacccccattccca

SEQ ID NO: 4159 - RNA, 22 nt, Homo sapiens
  source 1..22: mol_type = genomic RNA
tctctacatccccacatcgcct

SEQ ID NO: 4160 - RNA, 21 nt, Homo sapiens
  source 1..21: mol_type = genomic RNA
tcataagccctctgaccacta

SEQ ID NO: 4161 - RNA, 22 nt, Homo sapiens
  source 1..22: mol_type = genomic RNA
caggagaatcactgatgtcaga

SEQ ID NO: 4162 - RNA, 22 nt, Homo sapiens
  source 1..22: mol_type = genomic RNA
tctaccagttcctgcaggcgcg

SEQ ID NO: 4163 - RNA, 23 nt, Homo sapiens
  source 1..23: mol_type = genomic RNA
ctcctacaataagcccctgccca

SEQ ID NO: 4164 - RNA, 22 nt, Homo sapiens
  source 1..22: mol_type = genomic RNA
cctggcccacccgacccctgca

SEQ ID NO: 4165 - RNA, 20 nt, Homo sapiens
  source 1..20: mol_type = genomic RNA
gcatgtggtcgggtgcgcct

SEQ ID NO: 4166 - RNA, 22 nt, Homo sapiens
  source 1..22: mol_type = genomic RNA
gccccgacgttactcggactat

SEQ ID NO: 4167 - RNA, 23 nt, Homo sapiens
  source 1..23: mol_type = genomic RNA
ccccacgcccgccgcgggcccag

SEQ ID NO: 4168 - RNA, 20 nt, Homo sapiens
  source 1..20: mol_type = genomic RNA
tgagcggtgagggcatacag

SEQ ID NO: 4169 - RNA, 23 nt, Homo sapiens
  source 1..23: mol_type = genomic RNA
cactgtgggccctctccgcacca

SEQ ID NO: 4170 - RNA, 21 nt, Homo sapiens
  source 1..21: mol_type = genomic RNA
aactcaacaaccttaggacag

SEQ ID NO: 4171 - RNA, 21 nt, Homo sapiens
  source 1..21: mol_type = genomic RNA
tgcaagtcctgaggttgaaga

SEQ ID NO: 4172 - RNA, 22 nt, Homo sapiens
  source 1..22: mol_type = genomic RNA
ctagaagctcacagtctagttg

SEQ ID NO: 4173 - RNA, 23 nt, Homo sapiens
  source 1..23: mol_type = genomic RNA
cccagctagattgtaagctcctt

SEQ ID NO: 4174 - RNA, 22 nt, Homo sapiens
  source 1..22: mol_type = genomic RNA
cttacgtctctccctgggtccc

SEQ ID NO: 4175 - RNA, 22 nt, Homo sapiens
  source 1..22: mol_type = genomic RNA
tatggcagactgtgatttgttg

SEQ ID NO: 4176 - RNA, 21 nt, Homo sapiens
  source 1..21: mol_type = genomic RNA
cgacgcccggcggggcggaag

SEQ ID NO: 4177 - RNA, 22 nt, Homo sapiens
  source 1..22: mol_type = genomic RNA
ttaggtagactgggatttgttg

SEQ ID NO: 4178 - RNA, 22 nt, Homo sapiens
  source 1..22: mol_type = genomic RNA
aggttgaggttagtggcaacag

SEQ ID NO: 4179 - RNA, 22 nt, Homo sapiens
  source 1..22: mol_type = genomic RNA
tgctgttagccctagccccgca

SEQ ID NO: 4180 - RNA, 22 nt, Homo sapiens
  source 1..22: mol_type = genomic RNA
ggttagtggaccaggtcacaaa

SEQ ID NO: 4181 - RNA, 22 nt, Homo sapiens
  source 1..22: mol_type = genomic RNA
gtgtgctctctggtcaaccatc

SEQ ID NO: 4182 - RNA, 22 nt, Homo sapiens
  source 1..22: mol_type = genomic RNA
gtcaaaattgtttgcactctgc

SEQ ID NO: 4183 - RNA, 23 nt, Homo sapiens
  source 1..23: mol_type = genomic RNA
acaacaaaatcactagtcttcca

SEQ ID NO: 4184 - RNA, 20 nt, Homo sapiens
  source 1..20: mol_type = genomic RNA
tccccacagacccagagccg

SEQ ID NO: 4185 - RNA, 22 nt, Homo sapiens
  source 1..22: mol_type = genomic RNA
tgtgtcagtttcaccctgctgc

SEQ ID NO: 4186 - RNA, 22 nt, Homo sapiens
  source 1..22: mol_type = genomic RNA
gctcggccccggccccagcccc

SEQ ID NO: 4187 - RNA, 22 nt, Homo sapiens
  source 1..22: mol_type = genomic RNA
aggaggacaagtgagcacctgc

SEQ ID NO: 4188 - RNA, 21 nt, Homo sapiens
  source 1..21: mol_type = genomic RNA
catcaccttccttctcctcca

SEQ ID NO: 4189 - RNA, 22 nt, Homo sapiens
  source 1..22: mol_type = genomic RNA
gctgaggctgtggggctggagt

SEQ ID NO: 4190 - RNA, 22 nt, Homo sapiens
  source 1..22: mol_type = genomic RNA
aagaccagcaccaattcctcct

SEQ ID NO: 4191 - RNA, 23 nt, Homo sapiens
  source 1..23: mol_type = genomic RNA
agaaaccatggggtatgagcaga

SEQ ID NO: 4192 - RNA, 23 nt, Homo sapiens
  source 1..23: mol_type = genomic RNA
catgctcagacaaccatggtgca

SEQ ID NO: 4193 - RNA, 23 nt, Homo sapiens
  source 1..23: mol_type = genomic RNA
aaccaagaccccggagatcccag

SEQ ID NO: 4194 - RNA, 22 nt, Homo sapiens
  source 1..22: mol_type = genomic RNA
agctcagaacccagaggtctca

SEQ ID NO: 4195 - RNA, 23 nt, Homo sapiens
  source 1..23: mol_type = genomic RNA
tggccctgacacgtggtactgga

SEQ ID NO: 4196 - RNA, 23 nt, Homo sapiens
  source 1..23: mol_type = genomic RNA
acaaggatgaatctttgttactg

SEQ ID NO: 4197 - RNA, 22 nt, Homo sapiens
  source 1..22: mol_type = genomic RNA
tcccgggaactcatcagtctcc

SEQ ID NO: 4198 - RNA, 21 nt, Homo sapiens
  source 1..21: mol_type = genomic RNA
aggagactcacaagttcctgc

SEQ ID NO: 4199 - RNA, 22 nt, Homo sapiens
  source 1..22: mol_type = genomic RNA
tcggtccctcgggccagggcag

SEQ ID NO: 4200 - RNA, 21 nt, Homo sapiens
  source 1..21: mol_type = genomic RNA
cacaacctcagtgtttccagg

SEQ ID NO: 4201 - RNA, 22 nt, Homo sapiens
  source 1..22: mol_type = genomic RNA
cacctgataaaactgaggtata

SEQ ID NO: 4202 - RNA, 22 nt, Homo sapiens
  source 1..22: mol_type = genomic RNA
tgaattactttgtaaaccacca

SEQ ID NO: 4203 - RNA, 22 nt, Homo sapiens
  source 1..22: mol_type = genomic RNA
tggtgattcacaaagaaatcca

SEQ ID NO: 4204 - RNA, 21 nt, Homo sapiens
  source 1..21: mol_type = genomic RNA
ctgggaggagggagaagagga

SEQ ID NO: 4205 - RNA, 20 nt, Homo sapiens
  source 1..20: mol_type = genomic RNA
ccctgcgccatctcctctac

SEQ ID NO: 4206 - RNA, 22 nt, Homo sapiens
  source 1..22: mol_type = genomic RNA
tatccactacaccccgctgcct

SEQ ID NO: 4207 - RNA, 22 nt, Homo sapiens
  source 1..22: mol_type = genomic RNA
agaggcagggtagtgtaatgga

SEQ ID NO: 4208 - RNA, 22 nt, Homo sapiens
  source 1..22: mol_type = genomic RNA
cctcgggatggcgcccgttcac

SEQ ID NO: 4209 - RNA, 22 nt, Homo sapiens
  source 1..22: mol_type = genomic RNA
ttcacccaaagaggtgtcagtc

SEQ ID NO: 4210 - RNA, 21 nt, Homo sapiens
  source 1..21: mol_type = genomic RNA
tgactgacagctttttgagta

SEQ ID NO: 4211 - RNA, 21 nt, Homo sapiens
  source 1..21: mol_type = genomic RNA
acaatggttgtccgatattaa

SEQ ID NO: 4212 - RNA, 21 nt, Homo sapiens
  source 1..21: mol_type = genomic RNA
caactgatgcctttccaagta

SEQ ID NO: 4213 - RNA, 22 nt, Homo sapiens
  source 1..22: mol_type = genomic RNA
tcagtggctcaggttcgttgca

SEQ ID NO: 4214 - RNA, 22 nt, Homo sapiens
  source 1..22: mol_type = genomic RNA
tcaatgactcaggtaagttgca

SEQ ID NO: 4215 - RNA, 21 nt, Homo sapiens
  source 1..21: mol_type = genomic RNA
ctacgcagaaaggacacagtg

SEQ ID NO: 4216 - RNA, 22 nt, Homo sapiens
  source 1..22: mol_type = genomic RNA
tctacccagaaaggagccagtg

SEQ ID NO: 4217 - RNA, 22 nt, Homo sapiens
  source 1..22: mol_type = genomic RNA
tccactcagaaaggaaacagtg

SEQ ID NO: 4218 - RNA, 21 nt, Homo sapiens
  source 1..21: mol_type = genomic RNA
tgactggcacctttctgaata

SEQ ID NO: 4219 - RNA, 20 nt, Homo sapiens
  source 1..20: mol_type = genomic RNA
tactgcttccacagctcccc

SEQ ID NO: 4220 - RNA, 25 nt, Homo sapiens
  source 1..25: mol_type = genomic RNA
gaatcctggttctgtccctcactag

SEQ ID NO: 4221 - RNA, 23 nt, Homo sapiens
  source 1..23: mol_type = genomic RNA
gacgtagtcctattctctgctgc

SEQ ID NO: 4222 - RNA, 20 nt, Homo sapiens
  source 1..20: mol_type = genomic RNA
gcaagacatcacaagactct

SEQ ID NO: 4223 - RNA, 23 nt, Homo sapiens
  source 1..23: mol_type = genomic RNA
agcattgcaaccgatcccaacct

SEQ ID NO: 4224 - RNA, 22 nt, Homo sapiens
  source 1..22: mol_type = genomic RNA
gtaatgcaacaaatccccaccc

SEQ ID NO: 4225 - RNA, 22 nt, Homo sapiens
  source 1..22: mol_type = genomic RNA
acaggccgggacaagtgcaata

SEQ ID NO: 4226 - RNA, 22 nt, Homo sapiens
  source 1..22: mol_type = genomic RNA
ggaggccgggacgagtgcaata

SEQ ID NO: 4227 - RNA, 22 nt, Homo sapiens
  source 1..22: mol_type = genomic RNA
cactgcaccgcgtcccgtccct

SEQ ID NO: 4228 - RNA, 22 nt, Homo sapiens
  source 1..22: mol_type = genomic RNA
gggagaggtctccctgcgcaca

SEQ ID NO: 4229 - RNA, 22 nt, Homo sapiens
  source 1..22: mol_type = genomic RNA
cgggaagtgctagctcagcagt

SEQ ID NO: 4230 - RNA, 22 nt, Homo sapiens
  source 1..22: mol_type = genomic RNA
ccagtgtctccagtagtagaca

SEQ ID NO: 4231 - RNA, 23 nt, Homo sapiens
  source 1..23: mol_type = genomic RNA
gcggtagcggaagcggtaactgg

SEQ ID NO: 4232 - RNA, 23 nt, Homo sapiens
  source 1..23: mol_type = genomic RNA
ctacctgcacgaacagcactttg

SEQ ID NO: 4233 - RNA, 22 nt, Homo sapiens
  source 1..22: mol_type = genomic RNA
ctgcgattcctccctctactgt

SEQ ID NO: 4234 - RNA, 22 nt, Homo sapiens
  source 1..22: mol_type = genomic RNA
ggcagagagtcagagcgcggat

SEQ ID NO: 4235 - RNA, 20 nt, Homo sapiens
  source 1..20: mol_type = genomic RNA
ccagccccaccctgactcac

SEQ ID NO: 4236 - RNA, 22 nt, Homo sapiens
  source 1..22: mol_type = genomic RNA
actgggttcacctttaagggca

SEQ ID NO: 4237 - RNA, 21 nt, Homo sapiens
  source 1..21: mol_type = genomic RNA
ctggggagcagaggcccaggg

SEQ ID NO: 4238 - RNA, 24 nt, Homo sapiens
  source 1..24: mol_type = genomic RNA
cacccccagagcctcagctcccca

SEQ ID NO: 4239 - RNA, 22 nt, Homo sapiens
  source 1..22: mol_type = genomic RNA
actttcggttatctagctttat

SEQ ID NO: 4240 - RNA, 21 nt, Homo sapiens
  source 1..21: mol_type = genomic RNA
ggggagcgggggccctgcctt

SEQ ID NO: 4241 - RNA, 23 nt, Homo sapiens
  source 1..23: mol_type = genomic RNA
gcacatgtgcacacagccgggtg

SEQ ID NO: 4242 - RNA, 22 nt, Homo sapiens
  source 1..22: mol_type = genomic RNA
cacatggccaaaacagagaaga

SEQ ID NO: 4243 - RNA, 21 nt, Homo sapiens
  source 1..21: mol_type = genomic RNA
ctggaggacggcaacagtcag

SEQ ID NO: 4244 - RNA, 22 nt, Homo sapiens
  source 1..22: mol_type = genomic RNA
ctcatccgatgtacaataattt

SEQ ID NO: 4245 - RNA, 22 nt, Homo sapiens
  source 1..22: mol_type = genomic RNA
tgctcaataaatacccgttgaa

SEQ ID NO: 4246 - RNA, 23 nt, Homo sapiens
  source 1..23: mol_type = genomic RNA
tcatacagctagataaccaaaga

SEQ ID NO: 4247 - RNA, 22 nt, Homo sapiens
  source 1..22: mol_type = genomic RNA
catattggcactgcacatgatt

SEQ ID NO: 4248 - RNA, 23 nt, Homo sapiens
  source 1..23: mol_type = genomic RNA
agcaaaaatgtgctagtgccaaa

SEQ ID NO: 4249 - RNA, 22 nt, Homo sapiens
  source 1..22: mol_type = genomic RNA
gggaaagtagtaagttgtatag

SEQ ID NO: 4250 - RNA, 22 nt, Homo sapiens
  source 1..22: mol_type = genomic RNA
aacaatacaacttactacctca

SEQ ID NO: 4251 - RNA, 22 nt, Homo sapiens
  source 1..22: mol_type = genomic RNA
cagacccatagaagcgagcttg

SEQ ID NO: 4252 - RNA, 22 nt, Homo sapiens
  source 1..22: mol_type = genomic RNA
cacaagatcggatctacgggtt

SEQ ID NO: 4253 - RNA, 22 nt, Homo sapiens
  source 1..22: mol_type = genomic RNA
cggacccacagacacgagcttg

SEQ ID NO: 4254 - RNA, 22 nt, Homo sapiens
  source 1..22: mol_type = genomic RNA
cgcaaggtcggttctacgggtg

SEQ ID NO: 4255 - DNA, 615 bp, Homo sapiens
  source 1..615: mol_type = genomic DNA
atggctggacctgccacccagagccccatgaagctgatggccctgcagctgctgctgtggcacagtgcactctggacagtgcaggaagccacccccctgggccctgccagctccctgccccagagcttcctgctcaagtgcttagagcaagtgaggaagatccagggcgatggcgcagcgctccaggagaagctgtgtgccacctacaagctgtgccaccccgaggagctggtgctgctcggacactctctgggcatcccctgggctcccctgagcagctgccccagccaggccctgcagctggcaggctgcttgagccaactccatagcggccttttcctctaccaggggctcctgcaggccctggaagggatctcccccgagttgggtcccaccttggacacactgcagctggacgtcgccgactttgccaccaccatctggcagcagatggaagaactgggaatggcccctgccctgcagcccacccagggtgccatgccggccttcgcctctgctttccagcgccgggcaggaggggtcctggttgcctcccatctgcagagcttcctggaggtgtcgtaccgcgttctacgccaccttgcccagccctga

SEQ ID NO: 4256 - DNA, 800 bp, synthetic construct
  misc_feature 1..800: note = Description of Artificial Sequence: Synthetic Transcript Sequence
  source 1..800: mol_type = other DNA
taatacgactcactatagggaaataagagagaaaagaagagtaagaagaaatataagagccaccatggctggacctgccacccagagccccatgaagctgatggccctgcagctgctgctgtggcacagtgcactctggacagtgcaggaagccacccccctgggccctgccagctccctgccccagagcttcctgctcaagtgcttagagcaagtgaggaagatccagggcgatggcgcagcgctccaggagaagctgtgtgccacctacaagctgtgccaccccgaggagctggtgctgctcggacactctctgggcatcccctgggctcccctgagcagctgccccagccaggccctgcagctggcaggctgcttgagccaactccatagcggccttttcctctaccaggggctcctgcaggccctggaagggatctcccccgagttgggtcccaccttggacacactgcagctggacgtcgccgactttgccaccaccatctggcagcagatggaagaactgggaatggcccctgccctgcagcccacccagggtgccatgccggccttcgcctctgctttccagcgccgggcaggaggggtcctggttgcctcccatctgcagagcttcctggaggtgtcgtaccgcgttctacgccaccttgcccagccctgaagcgctgccttctgcggggcttgccttctggccatgcccttcttctctcccttgcacctgtacctcttggtctttgaataaagcctgagtaggaaggcggccgctcgagcatgcatctaga

SEQ ID NO: 4257 - DNA, 800 bp, synthetic construct
  misc_feature 1..800: note = Description of Artificial Sequence: Synthetic Transcript Sequence
  source 1..800: mol_type = other DNA
taatacgactcactatagggaaataagagagaaaagaagagtaagaagaaatataagagccaccatggccggtcccgcgacccaaagccccatgaaacttatggccctgcagttgctgctttggcactcggccctctggacagtccaagaagcgactcctctcggacctgcctcatcgttgccgcagtcattccttttgaagtgtctggagcaggtgcgaaagattcagggcgatggagccgcactccaagagaagctctgcgcgacatacaaactttgccatcccgaggagctcgtactgctcgggcacagcttggggattccctgggctcctctctcgtcctgtccgtcgcaggctttgcagttggcagggtgcctttcccagctccactccggtttgttcttgtatcagggactgctgcaagcccttgagggaatctcgccagaattgggcccgacgctggacacgttgcagctcgacgtggcggatttcgcaacaaccatctggcagcagatggaggaactggggatggcacccgcgctgcagcccacgcagggggcaatgccggcctttgcgtccgcgtttcagcgcagggcgggtggagtcctcgtagcgagccaccttcaatcatttttggaagtctcgtaccgggtgctgagacatcttgcgcagccgtgaagcgctgccttctgcggggcttgccttctggccatgcccttcttctctcccttgcacctgtacctcttggtctttgaataaagcctgagtaggaaggcggccgctcgagcatgcatctaga

SEQ ID NO: 4258 - RNA, 758 nt, synthetic construct
  misc_feature 1..758: note = Description of Artificial Sequence: Synthetic Transcript Sequence
  source 1..758: mol_type = other RNA
gggaaataagagagaaaagaagagtaagaagaaatataagagccaccatggccggtcccgcgacccaaagccccatgaaacttatggccctgcagttgctgctttggcactcggccctctggacagtccaagaagcgactcctctcggacctgcctcatcgttgccgcagtcattccttttgaagtgtctggagcaggtgcgaaagattcagggcgatggagccgcactccaagagaagctctgcgcgacatacaaactttgccatcccgaggagctcgtactgctcgggcacagcttggggattccctgggctcctctctcgtcctgtccgtcgcaggctttgcagttggcagggtgcctttcccagctccactccggtttgttcttgtatcagggactgctgcaagcccttgagggaatctcgccagaattgggcccgacgctggacacgttgcagctcgacgtggcggatttcgcaacaaccatctggcagcagatggaggaactggggatggcacccgcgctgcagcccacgcagggggcaatgccggcctttgcgtccgcgtttcagcgcagggcgggtggagtcctcgtagcgagccaccttcaatcatttttggaagtctcgtaccgggtgctgagacatcttgcgcagccgtgaagcgctgccttctgcggggcttgccttctggccatgcccttcttctctcccttgcacctgtacctcttggtctttgaataaagcctgagtaggaag

SEQ ID NO: 4259 - protein, 207 aa, Homo sapiens
MAGPATQSPMKLMALQLLLWHSALWTVQEATPLGPASSLPQSFLLKCLEQVRKIQGDGAALQEKLVSECATYKLCHPEELVLLGHSLGIPWAPLSSCPSQALQLAGCLSQLHSGLFLYQGLLQALEGISPELGPTLDTLQLDVADFATTIWQQMEELGMAPALQPTQGAMPAFASAFQRRAGGVLVASHLQSFLEVSYRVLRHLAQP

SEQ ID NO: 4260 - DNA, 27 bp, Homo sapiens
  source 1..27: mol_type = genomic DNA
ttggaccctcgtacagaagctaatacg

SEQ ID NO: 4261 - DNA, 149 bp, Homo sapiens
  source 1..149: mol_type = genomic DNA
ttttttttttttttttttttttttttttttttttttttttttttttttttttttttttttttttttttttttttttttttttttttttttttttttttttttttttttttttttttttttcttcctactcaggctttattcaaagacca

SEQ ID NO: 4262 - DNA, 29 bp, Homo sapiens
  source 1..29: mol_type = genomic DNA
cttcctactcaggctttattcaaagacca

SEQ ID NO: 4263 - DNA, 20 bp, Homo sapiens
  source 1..20: mol_type = genomic DNA
tggccggtcccgcgacccaa

SEQ ID NO: 4264 - DNA, 20 bp, Homo sapiens
  source 1..20: mol_type = genomic DNA
gcttcacggctgcgcaagat

SEQ ID NO: 4265 - DNA, 803 bp, synthetic construct
  misc_feature 1..803: note = Description of Artificial Sequence: Synthetic Transcript Sequence
  source 1..803: mol_type = other DNA
taatacgactcactatagggaaataagagagaaaagaagagtaagaagaaatataagagccaccatggccggtcccgcgacccaaagccccatgaaacttatggccctgcagttgctgctttggcactcggccctctggacagtccaagaagcgactcctctcggacctgcctcatcgttgccgcagtcattccttttgaagtgtctggagcaggtgcgaaagattcagggcgatggagccgcactccaagagaagctctgcgcgacatacaaactttgccatcccgaggagctcgtactgctcgggcacagcttggggattccctgggctcctctctcgtcctgtccgtcgcaggctttgcagttggcagggtgcctttcccagctccactccggtttgttcttgtatcagggactgctgcaagcccttgagggaatctcgccagaattgggcccgacgctggacacgttgcagctcgacgtggcggatttcgcaacaaccatctggcagcagatggaggaactggggatggcacccgcgctgcagcccacgcagggggcaatgccggcctttgcgtccgcgtttcagcgcagggcgggtggagtcctcgtagcgagccaccttcaatcatttttggaagtctcgtaccgggtgctgagacatcttgcgcagccgtgatgataagctgccttctgcggggcttgccttctggccatgcccttcttctctcccttgcacctgtacctcttggtctttgaataaagcctgagtaggaaggcggccgctcgagcatgcatctaga

SEQ ID NO: 4266 - RNA, 758 nt, synthetic construct
  misc_feature 1..758: note = Description of Artificial Sequence: Synthetic Transcript Sequence
  source 1..758: mol_type = other RNA
gggaaataagagagaaaagaagagtaagaagaaatataagagccaccatggccggtcccgcgacccaaagccccatgaaacttatggccctgcagttgctgctttggcactcggccctctggacagtccaagaagcgactcctctcggacctgcctcatcgttgccgcagtcattccttttgaagtgtctggagcaggtgcgaaagattcagggcgatggagccgcactccaagagaagctctgcgcgacatacaaactttgccatcccgaggagctcgtactgctcgggcacagcttggggattccctgggctcctctctcgtcctgtccgtcgcaggctttgcagttggcagggtgcctttcccagctccactccggtttgttcttgtatcagggactgctgcaagcccttgagggaatctcgccagaattgggcccgacgctggacacgttgcagctcgacgtggcggatttcgcaacaaccatctggcagcagatggaggaactggggatggcacccgcgctgcagcccacgcagggggcaatgccggcctttgcgtccgcgtttcagcgcagggcgggtggagtcctcgtagcgagccaccttcaatcatttttggaagtctcgtaccgggtgctgagacatcttgcgcagccgtgataagctgccttctgcggggcttgccttctggccatgcccttcttctctcccttgcacctgtacctcttggtctttgaataaagcctgagtaggaag

SEQ ID NO: 4267 - DNA, 825 bp, synthetic construct
  misc_feature 1..825: note = Description of Artificial Sequence: Synthetic Transcript Sequence
  source 1..825: mol_type = other DNA
taatacgactcactatagggaaataagagagaaaagaagagtaagaagaaatataagagccaccatggccggtcccgcgacccaaagccccatgaaacttatggccctgcagttgctgctttggcactcggccctctggacagtccaagaagcgactcctctcggacctgcctcatcgttgccgcagtcattccttttgaagtgtctggagcaggtgcgaaagattcagggcgatggagccgcactccaagagaagctctgcgcgacatacaaactttgccatcccgaggagctcgtactgctcgggcacagcttggggattccctgggctcctctctcgtcctgtccgtcgcaggctttgcagttggcagggtgcctttcccagctccactccggtttgttcttgtatcagggactgctgcaagcccttgagggaatctcgccagaattgggcccgacgctggacacgttgcagctcgacgtggcggatttcgcaacaaccatctggcagcagatggaggaactggggatggcacccgcgctgcagcccacgcagggggcaatgccggcctttgcgtccgcgtttcagcgcagggcgggtggagtcctcgtagcgagccaccttcaatcatttttggaagtctcgtaccgggtgctgagacatcttgcgcagccgtgatgataagctgccttctgcggggcttgccttctggccatgcccttcttctctcccttgcacctgtacctctcaaacaccattgtcacactccatggtctttgaataaagcctgagtaggaaggcggccgctcgagcatgcatctaga

SEQ ID NO: 4268 - RNA, 780 nt, synthetic construct
  misc_feature 1..780: note = Description of Artificial Sequence: Synthetic Transcript Sequence
  source 1..780: mol_type = other RNA
gggaaataagagagaaaagaagagtaagaagaaatataagagccaccatggccggtcccgcgacccaaagccccatgaaacttatggccctgcagttgctgctttggcactcggccctctggacagtccaagaagcgactcctctcggacctgcctcatcgttgccgcagtcattccttttgaagtgtctggagcaggtgcgaaagattcagggcgatggagccgcactccaagagaagctctgcgcgacatacaaactttgccatcccgaggagctcgtactgctcgggcacagcttggggattccctgggctcctctctcgtcctgtccgtcgcaggctttgcagttggcagggtgcctttcccagctccactccggtttgttcttgtatcagggactgctgcaagcccttgagggaatctcgccagaattgggcccgacgctggacacgttgcagctcgacgtggcggatttcgcaacaaccatctggcagcagatggaggaactggggatggcacccgcgctgcagcccacgcagggggcaatgccggcctttgcgtccgcgtttcagcgcagggcgggtggagtcctcgtagcgagccaccttcaatcatttttggaagtctcgtaccgggtgctgagacatcttgcgcagccgtgataagctgccttctgcggggcttgccttctggccatgcccttcttctctcccttgcacctgtacctctcaaacaccattgtcacactccatggtctttgaataaagcctgagtaggaag

SEQ ID NO: 4269 - DNA, 863 bp, synthetic construct
  misc_feature 1..863: note = Description of Artificial Sequence: Synthetic Transcript Sequence
  source 1..863: mol_type = other DNA
taatacgactcactatagggaaataagagagaaaagaagagtaagaagaaatataagagccaccatggccggtcccgcgacccaaagccccatgaaacttatggccctgcagttgctgctttggcactcggccctctggacagtccaagaagcgactcctctcggacctgcctcatcgttgccgcagtcattccttttgaagtgtctggagcaggtgcgaaagattcagggcgatggagccgcactccaagagaagctctgcgcgacatacaaactttgccatcccgaggagctcgtactgctcgggcacagcttggggattccctgggctcctctctcgtcctgtccgtcgcaggctttgcagttggcagggtgcctttcccagctccactccggtttgttcttgtatcagggactgctgcaagcccttgagggaatctcgccagaattgggcccgacgctggacacgttgcagctcgacgtggcggatttcgcaacaaccatctggcagcagatggaggaactggggatggcacccgcgctgcagcccacgcagggggcaatgccggcctttgcgtccgcgtttcagcgcagggcgggtggagtcctcgtagcgagccaccttcaatcatttttggaagtctcgtaccgggtgctgagacatcttgcgcagccgtgatgataagctgccttctgcggggcttgccttctggccatgcccttcttctctcccttgcacctgtacctctcaaacaccattgtcacaaacaccattgtcacaaacaccattgtcacaaacaccattgtcatggtctttgaataaagcctgagtaggaaggcggccgctcgagcatgcatctaga

SEQ ID NO: 4270 - RNA, 818 nt, synthetic construct
  misc_feature 1..818: note = Description of Artificial Sequence: Synthetic Transcript Sequence
  source 1..818: mol_type = other RNA
gggaaataagagagaaaagaagagtaagaagaaatataagagccaccatggccggtcccgcgacccaaagccccatgaaacttatggccctgcagttgctgctttggcactcggccctctggacagtccaagaagcgactcctctcggacctgcctcatcgttgccgcagtcattccttttgaagtgtctggagcaggtgcgaaagattcagggcgatggagccgcactccaagagaagctctgcgcgacatacaaactttgccatcccgaggagctcgtactgctcgggcacagcttggggattccctgggctcctctctcgtcctgtccgtcgcaggctttgcagttggcagggtgcctttcccagctccactccggtttgttcttgtatcagggactgctgcaagcccttgagggaatctcgccagaattgggcccgacgctggacacgttgcagctcgacgtggcggatttcgcaacaaccatctggcagcagatggaggaactggggatggcacccgcgctgcagcccacgcagggggcaatgccggcctttgcgtccgcgtttcagcgcagggcgggtggagtcctcgtagcgagccaccttcaatcatttttggaagtctcgtaccgggtgctgagacatcttgcgcagccgtgataagctgccttctgcggggcttgccttctggccatgcccttcttctctcccttgcacctgtacctctcaaacaccattgtcacaaacaccattgtcacaaacaccattgtcacaaacaccattgtcatggtctttgaataaagcctgagtaggaag

SEQ ID NO: 4271 - protein, 30 aa, Homo sapiens; identical to SEQ ID NO: 99

SEQ ID NO: 4272 - protein, 25 aa, Homo sapiens
MMPSSVSWGILLLAGLCCLVPVSLA

SEQ ID NO: 4273 - protein, 46 aa, Homo sapiens; identical to SEQ ID NO: 100

SEQ ID NO: 4274 - protein, 21 aa, Homo sapiens
MKGSLLLLLVSNLLLCQSVAP

SEQ ID NO: 4275 - protein, 24 aa, Homo sapiens
MKWVTFISLLFLFSSAYSRGVFRR

SEQ ID NO: 4276 - protein, 9 aa, Homo sapiens
PVAIIELEL

SEQ ID NO: 4277 - protein, 10 aa, Homo sapiens
VNQILKTLSE

SEQ ID NO: 4278 - protein, 7 aa, Homo sapiens
PKKKRKV

SEQ ID NO: 4279 - DNA, 1076 bp, Homo sapiens
  source 1..1076: mol_type = genomic DNA
gacaacatggcggccgcggtggcggcggcacctggggccttgggatccctgcatgctggcggcgcccgcctggtggccgcttgcagtgcgtggctctgcccggggttgaggctgcccggctcgttggcaggccggcgagcgggcccggcgatctgggcccagggctgggtacctgcggccgggggtcccgccccgaaaaggggctacagctctgagatgaagacggaggacgagctgcgggtgcggcacctggaggaggagaaccgaggaattgtggtgcttggaataaacagagcttatggcaaaaattcactcagtaaaaatcttataaaaatgctatcaaaagctgtggatgctttgaaatctgataagaaagtacggaccataataatcaggagtgaagtcccagggatattctgtgctggtgctgaccttaaggaaagagccaaaatgagttccagtgaagttggtccttttgtctccaaaataagagcagtgattaacgatattgctaatcttccagtaccaacaattgcagcaatagatggactcgctttaggtggtggtcttgaactggctttagcctgtgatatacgagtagcagcttcctctgcaaaaatgggcctggttgaaacaaaattggcgattattcctggtggagtgacttcctccactgaagtcttgaatccctccaagtcatccatgaagattggaatcatcatcttccaaactcctgttaatattgatattctggcctcttcccatgaatcatgaatgttcttaaagggatctagaatggcagatcctttccagaaggttttcaatttaatttgcccagatccataagaggaatcactgtctatggcagctatagccttatgaaatgtggtttttgttttgttttgtttttttgagacggagtctcgctctgttgccaggttggagtgcagtggtgtgatctcggctcactgcaacccctgcctccccggttcaagggattctcctgcctcagcctcctgagtagctgggactacaggtgcacaccaccgtgcccagctaatttttgtattttttgt

SEQ ID NO: 4280 - DNA, 1490 bp, Homo sapiens
  source 1..1490: mol_type = genomic DNA
aggtccacgccgtaaacagacaacatggcggccgcggtggcggcggcacctggggccttgggatccctgcatgctggcggcgcccgcctggtggccgcttgcagtgcgtggctctgcccggggttgaggctgcccggctcgttggcaggccggcgagcgggcccggcgatctgggcccagggctgggtacctgcggccgggggtcccgccccgaaaaggggctacagctctgagatgaagacggaggacgagctgcgggtgcggcacctggaggaggagaaccgaggaattgtggtgcttggaataaacagagcttatggcaaaaattcactcagtaaaaatcttataaaaatgctatcaaaagctgtggatgctttgaaatctgataagaaagtacggaccataataatcaggagtgaagtcccagggatattctgtgctgctaatcttccagtaccaacaattgcagcaatagatggactcgctttaggtggtggtcttgaactggctttagcctgtgatatacgagtagcagcttcctctgcaaaaatgggcctggttgaaacaaaattggcgattattcctggtggaggggggacacagcgattgccacgcgccattggaatgtccctggccaaggagctcatattctctgcgcgagtcctcgatggcaaagaagccaaagcagtgggcttaatcagccacgttctggaacagaaccaggagggagacgcggcctacaggaaggccttggacctggcgagagagtttttacctcagggacctgttgcaatgagagtggcaaaattagcaattaatcaagggatggaggtcgatttagtaacagggttagccatagaagaagcttgttatgctcagaccattccaacaaaagacagacttgaaggtcttcttgcttttaaagagaaaaggccccctcgctataaaggagaataaaaggaacagaaattcttaagatgccaatgtaataaatgtacttcctggaagtgtctttcggatccactatatgcctcagcacatggaaccttaatgaccaaagtgaagagcagattattcatacggtgtaataagcatctggaatggacccatccgtgtacttcattcaaatgtgtaaatgtcatattcattcagatttataaagctagtagtgtatagtcagaaacagaatcaaagttagatatacatttttaaatatttactgcatatgaggctttctgttaattttttaatgtgaataatttatatattgcacattctagggaataatattgattgtatgtctactgtgctgcattaagaaaataaaatttctatataccaaaaatgtgaagttataccaaataaagtttctaagtgattaatgcatacgaacagctacatatacatatatctaaacctgaaaaatgaattgatattctgagtgaaaactacctaatataaataaaattagtgaaaagaaaacatgggaa

SEQ ID NO: 4281 - DNA, 1577 bp, Homo sapiens
  source 1..1577: mol_type = genomic DNA
aggtccacgccgtaaacagacaacatggcggccgcggtggcggcggcacctggggccttgggatccctgcatgctggcggcgcccgcctggtggccgcttgcagtgcgtggctctgcccggggttgaggctgcccggctcgttggcaggccggcgagcgggcccggcgatctgggcccagggctgggtacctgcggccgggggtcccgccccgaaaaggggctacagctctgagatgaagacggaggacgagctgcgggtgcggcacctggaggaggagaaccgaggaattgtggtgcttggaataaacagagcttatggcaaaaattcactcagtaaaaatcttataaaaatgctatcaaaagctgtggatgctttgaaatctgataagaaagtacggaccataataatcaggagtgaagtcccagggatattctgtgctggtgctgaccttaaggaaagagccaaaatgagttccagtgaagttggtccttttgtctccaaaataagagcagtgattaacgatattgctaatcttccagtaccaacaattgcagcaatagatggactcgctttaggtggtggtcttgaactggctttagcctgtgatatacgagtagcagcttcctctgcaaaaatgggcctggttgaaacaaaattggcgattattcctggtggaggggggacacagcgattgccacgcgccattggaatgtccctggccaaggagctcatattctctgcgcgagtcctcgatggcaaagaagccaaagcagtgggcttaatcagccacgttctggaacagaaccaggagggagacgcggcctacaggaaggccttggacctggcgagagagtttttacctcagggacctgttgcaatgagagtggcaaaattagcaattaatcaagggatggaggtcgatttagtaacagggttagccatagaagaagcttgttatgctcagaccattccaacaaaagacagacttgaaggtcttcttgcttttaaagagaaaaggccccctcgctataaaggagaataaaaggaacagaaattcttaagatgccaatgtaataaatgtacttcctggaagtgtctttcggatccactatatgcctcagcacatggaaccttaatgaccaaagtgaagagcagattattcatacggtgtaataagcatctggaatggacccatccgtgtacttcattcaaatgtgtaaatgtcatattcattcagatttataaagctagtagtgtatagtcagaaacagaatcaaagttagatatacatttttaaatatttactgcatatgaggctttctgttaattttttaatgtgaataatttatatattgcacattctagggaataatattgattgtatgtctactgtgctgcattaagaaaataaaatttctatataccaaaaatgtgaagttataccaaataaagtttctaagtgattaatgcatacgaacagctacatatacatatatctaaacctgaaaaatgaattgatattctgagtgaaaactacctaatataaataaaattagtgaaaagaaaacatgggaa

SEQ ID NO: 4282 - DNA, 1397 bp, Homo sapiens
  source 1..1397: mol_type = genomic DNA
aggatgtgtagggggcggggcccggcggaagcgtatataaggccgggctcggggacgcccccccctcactcgcgcgttaggaggctcgggtcgttgtggtgcgctgtcttcccgcttgcgtcagggacctgcccgactcagtggccgccatggcatcagatgaaggcaaactttttgttggagggctgagttttgacaccaatgagcagtcgctggagcaggtcttctcaaagtacggacagatctctgaagtggtggttgtgaaagacagggagacccagagatctcggggatttgggtttgtcacctttgagaacattgacgacgctaaggatgccatgatggccatgaatgggaagtctgtagatggacggcagatccgagtagaccaggcaggcaagtcgtcagacaaccgatcccgtgggtaccgtggtggctctgccgggggccggggcttcttccgtgggggccgaggacggggccgtgggttctctagaggaggaggggaccgaggctatggggggaaccggttcgagtccaggagtgggggctacggaggctccagagactactatagcagccggagtcagagtggtggctacagtgaccggagctcgggcgggtcctacagagacagttatgacagttacgctacacacaacgagtaaaaacccttcctgctcaagatcgtccttccaatggctgtgtgtttaaagattgtgggagcttcgctgaacgttaatgtgtagtaaatgcacctccttgtattcccactttcgtagtcatttcggttctgatcttgtcaaacccagcctgaccgcttctgacgccgggatggcctcgttactagacttttctttttaaggaagtgctgtttttttttgagggttttcaaaacattttgaaaagcatttacttttttgaccacgagccatgagttttcaaaaaaatcgggggttgtgtgggtttttggtttttgttttagtttttggttgcgttgcctttttttttttagtggggttggccccatgaagtgggtgccccactcacttctctgagatcgaacggactgtgaatccgctctttgtcggaagctgagcaagctgtggcttttttccaactccgtgtgacgtttctgagtgtagtgtggtaggaccccggcgggtgtggcagcaactgccctggagccccagcccctgcgtccatctgtgctgtgcgccccacagtagacgtgcagacgtccctgagaggttcttgaagatgtttatttatattgtccttttttactggaagacgtacgcatactccatcgatgttgtatttgcagtggctgaggaattcttgtacgcagttttctttggctttacgaagccgattaaaagaccgtgtgaaatgaa

SEQ ID NO: 4283 - DNA, 3025 bp, Homo sapiens
  source 1..3025: mol_type = genomic DNA
actcgcgcgttaggaggctcgggtcgttgtggtgcgctgtcttcccgcttgcgtcagggacctgcccgactcagtggccgccatggcatcagatgaaggcaaactttttgttggagggctgagttttgacaccaatgagcagtcgctggagcaggtcttctcaaagtacggacagatctctgaagtctgtagatggacggcagatccgagtagaccaggcaggcaagtcgtcagacaaccgatcccgtgggtaccgtggtggctctgccgggggccggggcttcttccgtgggggccgaggacggggccgtgggttctctagaggaggaggggaccgaggctatggggggaaccggttcgagtccaggagtgggggctacggaggctccagagactactatagcagccggagtcagagtggtggctacagtgaccggagctcgggcgggtcctacagagacagttatgacagttacggtaagtcacactccgagggcgccacgctgctgtggcctgcggtgggagctcggttcaccttggtgccctctccaagcactttaggctggacactcagaccttgtcactgtgcttgcccagaagaggcgcatctgtcctctcagagccatttctatcgcaggacgcaaaagccaaatgagactgaccaaaaaggcaagggagagcgagggcccgctgggcagtcagctaggtgcatgtgtggccgcaggccagcctccctcggctgtggggggtggttgctccccggccgcaggccgcgccctggtctggcctctggggtgaagctgcctcttgttgcttcggtgcctttacactgtgcctgcttcttgtcctcagctacacacaacgagtaaaaacccttcctgctcaagatcgtccttccaatggctgtgtgtttaaagattgtgggagcttcgctgaacgttaatgtgtagtaaatgcacctccttgtattcccactttcgtagtcatttcggttctgatcttgtcaaacccagcctgaccgcttctgacgccgggatggcctcgttactagacttttctttttaaggaagtgctgtttttttttgagggttttcaaaacattttgaaaagcatttacttttttgaccacgagccatgagttttcaaaaaaatcgggggttgtgtgggtttttggtttttgttttagtttttggttgcgttgcctttttttttttagtggggttggccccatgaagtgggtgccccactcacttctctgagatcgaacggactgtgaatccgctctttgtcggaagctgagcaagctgtggcttttttccaactccgtgtgacgtttctgagtgtagtgtggtaggaccccggcgggtgtggcagcaactgccctggagccccagcccctgcgtccatctgtgctgtgcgccccacagtagacgtgcagacgtccctgagaggttcttgaagatgtttatttatattgtccttttttactggaagacgtacgcatactccatcgatgttgtatttgcagtggctgaggaattcttgtacgcagttttctttggctttacgaagccgattaaaagaccgtgtgaaatgaaccttgctctgacaattcccttgcattgcaccacacactccttgctgcgggctcctgcagccagacctgagcagagagagaaggtggagaagcagcgggtctgcaagccttccctggggcctgcagagctagaaagggaggcccagcagactggcgctggtcagggtaggggagccaggcgggggacgggagcgggcagctcaggcctcagggcagccctgggaggcttctggcagtggtggccagagggctggactgtgcgggcagcttagcagggacagtggacgtgcacctgacgctgacctggactgcctcagtctagaagcaggccagagagcagaggcacgtggcatcccagggcgacctcagacggccagccggttagctagttctgctgttgcttcacgagttctgagcattctctgctagcctatggaagctgcagccctcggaggacagaagtgttgtgcgcccaacagaaccctctgagacgcaagctgctcccttggctagctcatatgtggaaatagccctgtaattcgaggtaactccttccgctcgtgtccacatccctcttgttgagagctcactgaaagtcatgtgcccggggaatgttcctgtgactgttttttgtttttccttttttttttaactttgtttttgtttttttcaattaagctggaactaaagtcaggcccagccattacgctccccacgtgcagccaggtgcagcctgggcccagtcatgcctggctcatagatgaaatcccttaagcaggattgaagaccagtgaacgcccccgccttttggattttttgctcaattgaccgtcttttccagacctctttaagtcacactcttaacttagctttctctgatgtctgttgccgccattagtttttttctagagcccacactggcccacatagctccatcccatacgggtagctggctccagctgcgccaaggtgcagacccgccctgggcatgctggcctgtgacggagcctgaggtcacagccccctgactagcctgagaccttcctaggggctgtggctgtttccggggaggccgggaggggcagctgtgagccctgtggaggacgttgggagtaacgctgctttgctttggcaggttgaaggggcccggccaggactcggggaagggtggcctgagagcagcgatgacctctggggtcactgtcccaggagggacttcacctggaacaagagctggaggcagccgcttgcccaggaggcttgtcccctgaggcgcttcgccagtgaggtgcgggctcagggcctcgagtctctcctggagcacgggctgcggtgcgccggcagcttacggggcggccagtccttgcccacaacgatgtggagccctgtgaaagtcggattcgaataaagggccacgtgtgcacccag

SEQ ID NO: 4284 - DNA, 1543 bp, Homo sapiens
  source 1..1543: mol_type = genomic DNA
ctcactcgcgcgttaggaggctcgggtcgttgtggtgcgctgtcttcccgcttgcgtcagggacctgcccgactcagtggccgccatggcatcagatgaaggcaaactttttgttggagggctgagttttgacaccaatgagcagtcgctggagcaggtcttctcaaagtacggacagatctctgaagtggtggttgtgaaagacagggagacccagagatctcggggatttgggtttgtcacctttgagaacattgacgacgctaaggatgccatgatggccatgaatgggaagtctgtagatggacggcagatccgagtagaccaggcaggaggaggggaccgaggctatggggggaaccggttcgagtccaggagtgggggctacggaggctccagagactactatagcagccggagtcagagtggtggctacagtgaccggagctcgggcgggtcctacagagacagttatgacagttacggtaagtcacactccgagggcgccacgctgctgtggcctgcggtgggagctcggttcaccttggtgccctctccaagcactttaggctggacactcagaccttgtcactgtgcttgcccagaagaggcgcatctgtcctctcagagccatttctatcgcaggacgcaaaagccaaatgagactgaccaaaaaggcaagggagagcgagggcccgctgggcagtcagctaggtgcatgtgtggccgcaggccagcctccctcggctgtggggggtggttgctccccggccgcaggccgcgccctggtctggcctctggggtgaagctgcctcttgttgcttcggtgcctttacactgtgcctgcttcttgtcctcagctacacacaacgagtaaaaacccttcctgctcaagatcgtccttccaatggctgtgtgtttaaagattgtgggagcttcgctgaacgttaatgtgtagtaaatgcacctccttgtattcccactttcgtagtcatttcggttctgatcttgtcaaacccagcctgaccgcttctgacgccgggatggcctcgttactagacttttctttttaaggaagtgctgtttttttttgagggttttcaaaacattttgaaaagcatttacttttttgaccacgagccatgagttttcaaaaaaatcgggggttgtgtgggtttttggtttttgttttagtttttggttgcgttgcctttttttttttagtggggttggccccatgaagtgggtgccccactcacttctctgagatcgaacggactgtgaatccgctctttgtcggaagctgagcaagctgtggcttttttccaactccgtgtgacgtttctgagtgtagtgtggtaggaccccggcgggtgtggcagcaactgccctggagccccagcccctgcgtccatctgtgctgtgcgccccacagtagacgtgcagacgtccctgagaggttcttgaagatgtttatttatattgtccttttttactggaagacgtacgcatactccatcgatgttgtatttgcagtggctga

SEQ ID NO: 4285 - DNA, 2777 bp, Homo sapiens
  source 1..2777: mol_type = genomic DNA
tcagcagctgccctcactgggcagggcaaattataccgtggcccgaccataaaagccactttccaaaaaaagaagctttaaggcccccgagagacgcagctgagcctctcacctggcagtgcctgactcaggaggtgatgtctgggccatgagccacagagcctggtgtccctttaagcagggagtacaaattctcatccctccctcctgctctccctgacgtcagctggaaggcgtgtgagtgagtgaggggctgaggtaccgcccgcgcgagcacacacagacacacacacacacacacacacacacacacacacacatcttccagacccatcccctgcctgccagctccacgagccagagagagacagagcgcggacgccgcaggaggcagtgcctggaccccagctgcccaggagagacggagcccgtggctggtgaggccgcagagcagggccaggccgggccctgcccgcaaggacgaccaaacccctcaccggcccctgggccccagagcccaccaggctctcctgctggccccaccatgacttcagagtcgacgtcacccccagttgtgcccccgctccactcccccaagtccccagtctggcccaccttccccttccacagggagggcagcagggtctgggagcggggtggtgtcccacctcgggacctacccagccctctgcccaccaagcggaccaggacctattcagcgacagcccgggcctcagctggccccgtgttcaagggcgtctgtaagcagttctcacgctcacagggccatggcttcatcacccccgagaacgggtccgaggacatcttcgtacatgtgtctgacatcgagggggagtacgtgccagtggagggcgacgaggtgacctacaagatgtgccctatccctcccaagaaccagaagttccaggccgtggaggtggtgctcactcagctggccccccacactccccacgagacgtggtctggccaggtcgtgggctcctaggctgagtggttcacaggccagctggccgggggttggggagccacacagggtgaacgggcagcagccggctccatgccccactgccctggctgatgagtccttcggtggcctcagtgtgcacgtctgtctgtccgtctgtgcttgtggctatgagcgtgtgcctccacccaccccacgacccgtgactactgtgcaagctggccaggaggtaggtggagggcaaggccaccagacctggcttcgcgctgtccactgcctctctcctcccctccctgccgcagacacgcaggacccgctcgccctcctgcttacccgtccccacggtgactgagctgcgagagcctgcgctgggctcactccctggcctccgcccctgagctgtcccgtgtcagtccctggcccggagccaggctctctgtgctacttacatctccctcccttggctgaggtcccccgccacagcctggacccttccctcagaagcctggccgatgggtgcttttggggagcctctcagcctctggcaggggaggaggactgacacggaggcacacaggcctctcactgccgaggccagccttccttcctgctctgctctctcagtgccatggagaggcaggaagaggggcctgagggcggaaggggtttggggctcccatttcgccggccagtccctcctcctcagcctggcagtggcgctgggctccttcccctgggctgtactgagccgagcccaggggtttgcagagggtgggggtccatctctccagcttggctgcagacctcctttaccctgactcacaagccccactgatgctctgggccatgcccggctgacggctgctgtggatgccgcgagggacggacacacgtccggggcacccacgaggagggcccccagcctgggagactggccctgcggcctccacgtcaaactctcttcccaaagccctaacagaccagtggccgaggtgtggctcttattgcatccatccctgaagatgtgtggctgttgctgtcacctggagtccttttggggccaagatgtgtgtgcacccggggtcgtggccattcactcccaggcaggggtgagggtggcctggcccaggaggccaggaaggagggccctgtctgcctccacctctgggtgcaccccctgcctaccaccctcccttctagagagcacatcgcctgaccggggagaagtggggccgtggttcgagggagggctggccaggggtgggacccttatgagactcagtctgtgagtaaaactgggggctcaaatgcccaggatgaggggatcagtgactgtctaggaggatcccttgccttgtaggtgccccaagaccgcagggtagaaatcagccgggatgcctgcatcccacccccggccccagggcccaccacataaaatctgggagcccagagctgctgaggtgtggtcagctcccctaaaatgggcacggcccagcctgtcccatgaggaataaaggcccctggcccccttgagagagggcttgttggtgagggctgactcctgggggcccccaaggctcccctcctgtggggaggccaccttttaaggcaccactagcagtcaggatatggtggcatcagccctggggcctcctgggtggcaggggggcagcagctctcctccccactcacaggccctgcagtgctcatttggaattcctcccaagacccctggccacccagaccccccattcttcctaacactggcaataaaccctcaactgtgacccac

SEQ ID NO: 4286 - DNA, 1263 bp, Homo sapiens
  source 1..1263: mol_type = genomic DNA
atgtcggaggagcagttcggcggggacggggcggcggcagcggcaacggcggcggcgtctggaggcaccgaagggggcagcgccgagtcggagggggcgaagattgacgccagtaagaacgaggaggatgaagggaaaatgtttataggaggccttagctgggacactacaaagaaagatctgaaggactacttttccaaatttggtgaagttgtagactgcactctgaagttagatcctatcacagggcgatcaaggggttttggctttgtgctatttaaagaatcggagagtgtagataaggtcatggatcaaaaagaacataaattgaatgggaaggtgattgatcctaaaagggccaaagccatgaaaacaaaagagccggttaaaaaaatttttgttggtggcctttctccagatacacctgaagagaaaataagggagtactttggtggttttggtgaggtggaatccatagagctccccatggacaacaagaccaataagaggcgtgggttctgctttattacctttaaggaagaagaaccagtgaagaagataatggaaaagaaataccacaatgttggtcttagtaaatgtgaaataaaagtagccatgtcgaaggaacaatatcagcaacagcaacagtggggatctagaggaggatttgcaggaagagctcgtggaagaggtggtggccccagtcaaaactggaaccagggatatagtaactattggaatcaaggctatggcaactatggatataacagccaaggttacggtggttatggaggatatgactacactggttacaacaactactatggatatggtgattatagcaaccagcagagtggttatgggaaggtatccaggcgaggtggtcatcaaaatagctacaaaccatactaaattattccatttgcaacttatccccaacaggtggtgaagcagtattttccaatttgaagattcatttgaaggtggctcctgccacctgctaatagcagttcaaactaaattttttgtatcaagtccctgaatggaagtatgacgttgggtccctctgaagtttaattctgagttctcattaaaagaaatttgctttcattgttttatttcttaattgctatgcttcagaatcaatttgtgttttatgccctttcccccagtattgtagagcaagtcttgtgttaaaagcccagtgtgacagtgtcatgatgtagtagtgtcttactggttttttaataaatccttttgtat

SEQ ID NO: 4287 - DNA, 3033 bp, Homo sapiens
  source 1..3033: mol_type = genomic DNA
aaagcgaggaggaggcgagagcggccgccgctggtgcttattcttttttagtgcagcgggagagagcgggagtgtgcgccgcgcgagagtgggaggcgaagggggcaggccagggagaggcgcaggagcctttgcagccacgcgcgcgccttccctgtcttgtgtgcttcgcgaggtagagcgggcgcgcggcagcggcggggattactttgctgctagtttcggttcgcggcagcggcgggtgtagtctcggcggcagcggcggagacactagcactatgtcggaggagcagttcggcggggacggggcggcggcagcggcaacggcggcggtaggcggctcggcgggcgagcaggagggagccatggtggcggcgacacagggggcagcggcggcggcgggaagcggagccgggaccgggggcggaaccgcgtctggaggcaccgaagggggcagcgccgagtcggagggggcgaagattgacgccagtaagaacgaggaggatgaaggccattcaaactcctccccacgacactctgaagcagcgacggcacagcgggaagaatggaaaatgtttataggaggccttagctgggacactacaaagaaagatctgaaggactacttttccaaatttggtgaagttgtagactgcactctgaagttagatcctatcacagggcgatcaaggggttttggctttgtgctatttaaagaatcggagagtgtagataaggtcatggatcaaaaagaacataaattgaatgggaaggtgattgatcctaaaagggccaaagccatgaaaacaaaagagccggttaaaaaaatttttgttggtggcctttctccagatacacctgaagagaaaataagggagtactttggtggttttggtgaggtggaatccatagagctccccatggacaacaagaccaataagaggcgtgggttctgctttattacctttaaggaagaagaaccagtgaagaagataatggaaaagaaataccacaatgttggtcttagtaaatgtgaaataaaagtagccatgtcgaaggaacaatatcagcaacagcaacagtggggatctagaggaggatttgcaggaagagctcgtggaagaggtggtggccccagtcaaaactggaaccagggatatagtaactattggaatcaaggctatggcaactatggatataacagccaaggttacggtggttatggaggatatgactacactggttacaacaactactatggatatggtgattatagcaaccagcagagtggttatgggaaggtatccaggcgaggtggtcatcaaaatagctacaaaccatactaaattattccatttgcaacttatccccaacaggtggtgaagcagtattttccaatttgaagattcatttgaaggtggctcctgccacctgctaatagcagttcaaactaaattttttgtatcaagtccctgaatggaagtatgacgttgggtccctctgaagtttaattctgagttctcattaaaagaaatttgctttcattgttttatttcttaattgctatgcttcagaatcaatttgtgttttatgccctttcccccagtattgtagagcaagtcttgtgttaaaagcccagtgtgacagtgtcatgatgtagtagtgtcttactggttttttaataaatccttttgtataaaaatgtattggctcttttatcatcagaataggaaaaattgtcatggattcaagttattaaaagcataagtttggaagacaggcttgccgaaattgaggacatgattaaaattgcagtgaagtttgaaatgtttttagcaaaatctaatttttgccataatgtgtcctccctgtccaaattgggaatgacttaatgtcaatttgtttgttggttgttttaataatacttccttatgtagccattaagatttatatgaatattttcccaaatgcccagtttttgcttaatatgtattgtgctttttagaacaaatctggataaatgtgcaaaagtacccctttgcacagatagttaatgttttatgcttccattaaataaaaaggacttaaaatctgttaattataatagaaatgcggctagttcagagagatttttagagctgtggtggacttcatagatgaattcaagtgttgagggaggattaaagaaatatataccgtgtttatgtgtgtgtgcttatttgtttgaatgattttattttccatttctcaaaggttttatttttttggttagggccttaaaatttcaggactgtgattattagtatgtgtgcctaaggaactttttgagtcactcttaagaaagtgaaactgaagagtctaagtgataactataggattaagtcagaattgtttttcctgtcatttgttggaagcttcttgagttctgttattagcattcagggaattgatacccatcaacttgaatggaaaatcgtttgtaggtattacttaagtgaatgttaagagttccaccctgagtggtaatctaaggctgtgcagtcagttacttcagactgctcagaatagttcattagaaaggtaacaaatgagaaatgtattattatacagttctatagtagtgaagtgatggaatacctttcttacttttgtggagttacatctgatgctaagaatttgacctccaactaagcaaacattttaatgagcaaaagttagtgttattaaagtttttttatgatagatccaaattgaggacctgtgtcctgtttttataagattgcaacccagctatgctcatttgtttatgttttgtatatggctgcttttgtgttacagtggtagagtttagtagttaggacagagacctgcaaagcaaaataatttacagtctggccctttacagaaaagtttgctgactcatggtcaaaataaatgaaaattttttgtgttagggttgttaagctagggttctttttggtatcatatgcttattttatgtaaatctctcaataaaaaattatttttaagaga

SEQ ID NO: 4288 - DNA, 1411 bp, Homo sapiens
  source 1..1411: mol_type = genomic DNA
gtcggccattttaggtggtccgcggcggcgccattaaagcgaggaggaggcgagagcggccgccgctggtgcttattcttttttagtgcagcgggagagagcgggagtgtgcgccgcgcgagagtgggaggcgaagggggcaggccagggagaggcgcaggagcctttgcagccacgcgcgcgccttccctgtcttgtgtgcttcgcgaggtagagcgggcgcgcggcagcggcggggattactttgctgctagtttcggttcgcggcagcggcgggtgtagtctcggcggcagcggcggagacactagcactatgtcggaggagcagttcggcggggacggggcggcggcagcggcaacggcggcggtaggcggctcggcgggcgagcaggagggagccatggtggcggcgacacagggggcagcggcggcggcgggaagcggagccgggaccgggggcggaaccgcgtctggaggcaccgaagggggcagcgccgagtcggagggggcgaagattgacgccagtaagaacgaggaggatgaagggtcatggatcaaaaagaacataaattgaatgggaaggtgattgatcctaaaagggccaaagccatgaaaacaaaagagccggttaaaaaaatttttgttggtggcctttctccagatacacctgaagagaaaataagggagtactttggtggttttggtgaggtggaatccatagagctccccatggacaacaagaccaataagaggcgtgggttctgctttattacctttaaggaagaagaaccagtgaagaagataatggaaaagaaataccacaatgttggtcttagtaaatgtgaaataaaagtagccatgtcgaaggaacaatatcagcaacagcaacagtggggatctagaggaggatttgcaggaagagctcgtggaagaggtggtggccccagtcaaaactggaaccagggatatagtaactattggaatcaaggctatggcaactatggatataacagccaaggttacggtggttatggaggatatgactacactggttacaacaactactatggatatggtgattatagcaaccagcagagtggttatgggaaggtatccaggcgaggtggtcatcaaaatagctacaaaccatactaaattattccatttgcaacttatccccaacaggtatgttctaaaaatagtttttttttgtcatttacaatagtagtttttataatctatattgttcataaaacaatgcttaatttaagagtttcacagcacccagaagtgcttaccatattataacatagtgactttcaaagatatgtaacacaggtgctcttaagcttttgcctttttgtcctattattaacaagtcagtaaagttaacaggtaaagtactgctaat

SEQ ID NO: 4289 - DNA, 607 bp, Homo sapiens
  source 1..607: mol_type = genomic DNA
ttaaaggcccccaaggctgtgcaacgcggagcgtgagaggaagagcgggcgcgcggcagcggcggggattactttgctgctagtttcggttcgcggcagcggcgggtgtagtctcggcggcagcggcggagacactagcactatgtcggaggagcagttcggcggggacggggcggcggcagcggcaacggcggcggtaggcggctcggcgggcgagcaggagggagccatggtggcggcgacacagggggcagcggcggcggcgggaagcggagccgggaccgggggcggaaccgcgtctggaggcaccgaagggggcagcgccgagtcggagggggcgaagattgacgccagtaagaacgaggaggatgaagggaaaatgtttataggaggccttagctgggacactacaaagaaagatctgaaggactacttttccaaatttggtgaagttgtagactgcactctgaagttagatcctatcacagggcgatcaaggggttttggctttgtgctatttaaagaatcggagagtgtagataaggtcatggatcaaaaagaacataaattgaatgggaaggtgattgatcctaaaagggccaaagcc

SEQ ID NO: 4290 - DNA, 748 bp, Homo sapiens
  source 1..748: mol_type = genomic DNA
tgtgcaacgcggagcgtgagaggaagtttcggttcgcggcagcggcgggtgtagtctcggcggcagcggcggagacactagcactatgtcggaggagcagttcggcggggacggggcggcggcagcggcaacggcggcggtaggcggctcggcgggcgagcaggagggagccatggtggcggcgacacagggggcagcggcggcggcgggaagcggagccgggaccgggggcggaaccgcgtctggaggcaccgaagggggcagcgccgagtcggagggggcgaagattgacgccagtaagaacgaggaggatgaaggccattcaaactcctccccacgacactctgaagcagcgacggcacagcgggaagaatggaaaatgtttataggaggccttagctgggacactacaaagaaagatctgaaggactacttttccaaatttggtgaagttgtagactgcactctgaagttagatcctatcacagggcgatcaaggggttttggctttgtgctatttaaagaatcggagagtgtagataaggtcatggatcaaaaagaacataaattgaatgggaaggtgattgatcctaaaagggccaaagccatgaaaacaaaagagccggttaaaaaaatttttgttggtggcctttctccagatacacctgaagagaaaataagggagtactttggtggttttggtgaggtggaatccatagagctccccatggacaacaagaccaataag

SEQ ID NO: 4291 - DNA, 1585 bp, Homo sapiens
  source 1..1585: mol_type = genomic DNA
ccattttaggtggtccgcggcggcgccattaaagcgaggaggaggcgagagcggccgccgctggtgcttattcttttttagtgcagcgggagagagcgggagtgtgcgccgcgcgagagtgggaggcgaagggggcaggccagggagaggcgcaggagcctttgcagccacgcgcgcgccttccctgtcttgtgtgcttcgcgaggtagagcgggcgcgcggcagcggcggggattactttgctgctagtttcggttcgcggcagcggcgggtgtagtctcggcggcagcggcggagacactagcactatgtcggaggagcagttcggcggggacggggcggcggcagcggcaacggcggcggtaggcggctcggcgggcgagcaggagggagccatggtggcggcgacacagggggcagcggcggcggcgggaagcggagccgggaccgggggcggaaccgcgtctggaggcaccgaagggggcagcgccgagtcggagggggcgaagattgacgccagtaagaacgaggaggatgaaggccattcaaactcctccccacgacactctgaagcagcgacggcacagcgggaagaatggaaaatgtttataggaggccttagctgggacactacaaagaaagatctgaaggactacttttccaaatttggtgaagttgtagactgcactctgaagttagatcctatcacagggcgatcaaggggttttggctttgtgctatttaaagaatcggagagtgtagataaggtcatggatcaaaaagaacataaattgaatgggaaggtgattgatcctaaaagggccaaagccatgaaaacaaaagagccggttaaaaaaatttttgttggtggcctttctccagatacacctgaagagaaaataagggagtactttggtggttttggtgaggtggaatccatagagctccccatggacaacaagaccaataagaggcgtgggttctgctttattacctttaaggaagaagaaccagtgaagaagataatggaaaagaaataccacaatgttggtcttagtaaatgtgaaataaaagtagccatgtcgaaggaacaatatcagcaacagcaacagtggggatctagaggaggatttgcaggaagagctcgtggaagaggtggtgaccagcagagtggttatgggaaggtatccaggcgaggtggtcatcaaaatagctacaaaccatactaaattattccatttgcaacttatccccaacaggtggtgaagcagtattttccaatttgaagattcatttgaaggtggctcctgccacctgctaatagcagttcaaactaaattttttgtatcaagtccctgaatggaagtatgacgttgggtccctctgaagtttaattctgagttctcattaaaagaaatttgctttcattgttttatttcttaattgctatgcttcagaatcaatttgtgttttatgccctttcccccagtattgtagagcaagtcttgtgttaaaagcccagtgtgacagtgtcatgatgtagtagtgtcttactggttttttaataaatccttttgtataaaaa

SEQ ID NO: 4292 - DNA, 1089 bp, Homo sapiens
  source 1..1089: mol_type = genomic DNA
gaaaatgtttataggaggccttagctgggacactacaaagaaagatctgaaggactacttttccaaatttggtgaagttgtagactgcactctgaagttagatcctatcacagggcgatcaaggggttttggctttgtgctatttaaagaatcggagagtgtagataaggtcatggatcaaaaagaacataaattgaatgggaaggtgattgatcctaaaagggccaaagccatgaaaacaaaagagccggttaaaaaaatttttgttggtggcctttctccagatacacctgaagagaaaataagggagtactttggtggttttggtgaggtggaatccatagagctccccatggacaacaagaccaataagaggcgtgggttctgctttattacctttaaggaagaagaaccagtgaagaagataatggaaaagaaataccacaatgttggtcttagtaaatgtgaaataaaagtagccatgtcgaaggaacaatatcagcaacagcaacagtggggatctagaggaggatttgcaggaagagctcgtggaagaggtggtgaccagcagagtggttatgggaaggtatccaggcgaggtggtcatcaaaatagctacaaaccatactaaattattccatttgcaacttatccccaacagcgggaacttcattgcaggccctgtgtcgcgctgacttcacgattctcacaggcccgctcaatgcggacagggtacgagatgctcacgctctcgaatgctgccgtttggtggtgaagcagtattttccaatttgaagattcatttgaaggtggctcctgccacctgctaatagcagttcaaactaaattttttgtatcaagtccctgaatggaagtatgacgttgggtccctctgaagtttaattctgagttctcattaaaagaaatttgctttcattgttttatttcttaattgctatgcttcagaatcaatttgtgttttatgccctttcccccagtattgtagagcaagtcttgtgttaaaagcccagtgtgacagtgtcatgatgtagtagtgtcttactggttttttaataaatccttttgtat

SEQ ID NO: 4293 - DNA, 1667 bp, Homo sapiens
  source 1..1667: mol_type = genomic DNA
ttttaggtggtccgcggcggcgccattaaagcgaggaggaggcgagagcggccgccgctggtgcttattcttttttagtgcagcgggagagagcgggagtgtgcgccgcgcgagagtgggaggcgaagggggcaggccagggagaggcgcaggagcctttgcagccacgcgcgcgccttccctgtcttgtgtgcttcgcgaggtagagcgggcgcgcggcagcggcggggattactttgctgctagtttcggttcgcggcagcggcgggtgtagtctcggcggcagcggcggagacactagcactatgtcggaggagcagttcggcggggacggggcggcggcagcggcaacggcggcggtaggcggctcggcgggcgagcaggagggagccatggtggcggcgacacagggggcagcggcggcggcgggaagcggagccgggaccgggggcggaaccgcgtctggaggcaccgaagggggcagcgccgagtcggagggggcgaagattgacgccagtaagaacgaggaggatgaagggaaaatgtttataggaggccttagctgggacactacaaagaaagatctgaaggactacttttccaaatttggtgaagttgtagactgcactctgaagttagatcctatcacagggcgatcaaggggttttggctttgtgctatttaaagaatcggagagtgtagataaggtcatggatcaaaaagaacataaattgaatgggaaggtgattgatcctaaaagggccaaagccatgaaaacaaaagagccggttaaaaaaatttttgttggtggcctttctccagatacacctgaagagaaaataagggagtactttggtggttttggtgaggtggaatccatagagctccccatggacaacaagaccaataagaggcgtgggttctgctttattacctttaaggaagaagaaccagtgaagaagataatggaaaagaaataccacaatgttggtcttagtaaatgtgaaataaaagtagccatgtcgaaggaacaatatcagcaacagcaacagtggggatctagaggaggatttgcaggaagagctcgtggaagaggtggtggccccagtcaaaactggaaccagggatatagtaactattggaatcaaggctatggcaactatggatataacagccaaggttacggtggttatggaggatatgactacactggttacaacaactactatggatatggtgattatagcaaccagcagagtggttatgggaaggtatccaggcgaggtggtcatcaaaatagctacaaaccatactaaattattccatttgcaacttatccccaacaggtggtgaagcagtattttccaatttgaagattcatttgaaggtggctcctgccacctgctaatagcagttcaaactaaattttttgtatcaagtccctgaatggaagtatgacgttgggtccctctgaagtttaattctgagttctcattaaaagaaatttgctttcattgttttatttcttaattgctatgcttcagaatcaatttgtgttttatgccctttcccccagtattgtagagcaagtcttgtgttaaaagcccagtgtgacagtgtcatgatgtagtagtgtcttactggttttttaataaatccttttgtat

SEQ ID NO: 4294 - DNA, 1197 bp, Homo sapiens
  source 1..1197: mol_type = genomic DNA
atgtcggaggagcagttcggcggggacggggcggcgggcaacggcggcggtaggcgggcgggcgagcaggagggagccatggtggcggcgacacagggggcagcggcgcgggaagcggagccgggaccgggggcggaaccgcgtctggaggcaccgaagggggccgagtcggagggggcgaagattgacgccagtaagaacgaggaggatgaagggaaaatgtttataggaggccttagctgggacactacaaagaaagatctgaaggactacttttccaaatttggtgaagttgtagactgcactctgaagttagatcctatcacagggcgatcaaggggttttggctttgtgctatttaaagaatcggagagtgtagataaggtcatggatcaaaaagaacataaattgaatgggaaggtgattgatcctaaaagggccaaagccatgaaaacaaaagagccggttaaaaaaatttttgttggtggcctttctccagatacacctgaagagaaaataagggagtactttggtggttttggtgaggtggaatccatagagctccccatggacaacaagaccaataagaggcgtgggttctgctttattacctttaaggaagaagaaccagtgaagaagataatggaaaagaaataccacaatgttggtcttagtaaatgtgaaataaaagtagccatgtcgaaggaacaatatcagcaacagcaacagtggggatctagaggaggatttgcaggaagagctcgtggaagaggtggtgaccagcagagtggttatgggaaggtatccaggcgaggtggtcatcaaaatagctacaaaccatactaaattattccatttgcaacttatccccaacaggtggtgaagcagtattttccaatttgaagattcatttgaaggtggctcctgccacctgctaatagcagttcaaactaaattttttgtatcaagtccctgaatggaagtatgacgttgggtccctctgaagtttaattctgagttctcattaaaagaaatttgctttcattgttttatttcttaattgctatgcttcagaatcaatttgtgttttatgccctttcccccagtattgtagagcaagtcttgtgttaaaagcccagtgtgacagtgtcatgatgtagtagtgtcttactggttttttaataaatccttttgtat

SEQ ID NO: 4295 - DNA, 8274 bp, Homo sapiens
  source 1..8274: mol_type = genomic DNA
atttagaggcggcgccagggcggccgcggagaaacgtgacacaccagccctctcggaggggtttcggaccgaagggaagaagctgcgccgtgtcgtccgtctccctgcgcgccgcgggcacttctcctgggctctccccgaactctcccgcgacctctgcgcgccctcaggccgccttccccgccctgggctcgggacaacttctggggtggggtgcaaagaaagtttgcggctcctgccgccggcctctccgcctcttggcctaggaggctcgccgcccgcgcccgctcgttcggccttgcccgggaccgcgtcctgccccgagaccgccaccatgaacaagctttacatcggcaacctcaacgagagcgtgacccccgcggacttggagaaagtgtttgcggagcacaagatctcctacagcggccagttcttggtcaaatccggctacgccttcgtggactgcccggacgagcactgggcgatgaaggccatcgaaactttctccgggaaagtagaattacaaggaaaacgcttagagattgaacattcggtgcccaaaaaacaaaggagccggaaaattcaaatccgaaatattccaccccagctccgatgggaagtactggacagcctgctggctcagtatggtacagtagagaactgtgagcaagtgaacaccgagagtgagacggcagtggtgaatgtcacctattccaaccgggagcagaccaggcaagccatcatgaagctgaatggccaccagttggagaaccatgccctgaaggtctcctacatccccgatgagcagatagcacagggacctgagaatgggcgccgagggggctttggctctcggggtcagccccgccagggctcacctgtggcagcgggggccccagccaagcagcagcaagtggacatcccccttcggctcctggtgcccacccagtatgtgggtgccattattggcaaggagggggccaccatccgcaacatcacaaaacagacccagtccaagatagacgtgcataggaaggagaacgcaggtgcagctgaaaaagccatcagtgtgcactccacccctgagggctgctcctccgcttgtaagatgatcttggagattatgcataaagaggctaaggacaccaaaacggctgacgaggttcccctgaagatcctggcccataataactttgtagggcgtctcattggcaaggaaggacggaacctgaagaaggtagagcaagataccgagacaaaaatcaccatctcctcgttgcaagaccttaccctttacaaccctgagaggaccatcactgtgaagggggccatcgagaattgttgcagggccgagcaggaaataatgaagaaagttcgggaggcctatgagaatgatgtggctgccatgagcctgcagtctcacctgatccctggcctgaacctggctgctgtaggtcttttcccagcttcatccagcgcagtcccgccgcctcccagcagcgttactggggctgctccctatagctcctttatgcaggctcccgagcaggagatggtgcaggtgtttatccccgcccaggcagtgggcgccatcatcggcaagaaggggcagcacatcaaacagctctcccggtttgccagcgcctccatcaagattgcaccacccgaaacacctgactccaaagttcgtatggttatcatcactggaccgccagaggcccaattcaaggctcagggaagaatctatggcaaactcaaggaggagaacttctttggtcccaaggaggaagtgaagctggagacccacatacgtgtgccagcatcagcagctggccgggtcattggcaaaggtggaaaaacggtgaacgagttgcagaatttgacggcagctgaggtggtagtaccaagagaccagacccctgatgagaacgaccaggtcatcgtgaaaatcatcggacatttctatgccagtcagatggctcaacggaagatccgagacatcctggcccaggttaagcagcagcatcagaagggacagagtaaccaggcccaggcacggaggaagtgaccagcccctccctgtcccttcgagtccaggacaacaacgggcagaaatcgagagtgtgctctccccggcaggcctgagaatgagtgggaatccgggacacctgggccgggctgtagatcaggtttgcccacttgattgagaaagatgttccagtgaggaaccctgatctctcagccccaaacacccacccaattggcccaacactgtctgcccctcggggtgtcagaaattctagcgcaaggcacttttaaacgtggattgtttaaagaagctctccaggccccaccaagagggtggatcacacctcagtgggaagaaaaataaaatttccttcaggttttaaaaacatgcagagaggtgttttaatcagccttaaaggatggttcatttcttgaccttaatgtttttccaatcttcttccccctacttgggtaattgattaaaatacctccatttacggcctctttctatatttacactaatttttttatctttattgctaccagaaaaaaatgcgaacgaatgcattgctttgcttacagtattgactcaagggaaaagaactgtcagtatctgtagattaattccaatcactccctaaccaataggtacaatacggaatgaagaagaggggaaaatggggagaaagatggttaaaatacataataatccacgtttaaaaggagcgcacttgtggctgatctatgccagatcaccatcttcaaattggcacaactgaaatttccccactctgttggggcttccccaccacattcatgtccctctcccgtgtaggtttcacattatgtccaggtgcacataggtggtattgaatgctcagcagggtaggggctgaccactgtccctgattcccatcgttctcaggcggattttatatttttttaaagtctattttaatgattggatatgagcactgggaaggggacgctaactccccttgataaagtctcggttccatggaggacttgagtggccccaaaggctgccacggtgccctcaccccagcccatgtgctcccataagggctggttcctagaggcaggggttgtggggcactcccagccacggcactgttaccttggtggtgggacttggaacccaaccctgagctcccgataaagctaaagtccatcatctggcaaattcagtaaattggagagtacttgcttctgtttgtatctgagaggaatttttaactgacggcttctgtctccatgaatcattatcagcatgatgaaaggtgtgtctaaaaaacaattcagaataccagcagcattgtacagcaaggggtaaataagcttaatttattaatttaccaggcttaattaagatcccatggagtgtttagcccttgtgggagacagaagccatcagttaaatgaggttaggcctctcctcctaatatactgattgacaatgcatattagccaggtaatgcactttagctaccctggacaatgctatcaagtgtgctgggaagggaggaaggcctctctacatatggaaaagcccatgcgtggagttcccctcctttcaacattgcaacaacagtaacaacaagacaaccgcaacatgtgggcgtagtcaggcaatgctgtgtgcgaagtaaactacctcaaggtatgaagttacctcagcaattattttcctttttgttccccccaaccccattaaaaaaatttttttttgatttttgtttttttgcagcttgctgatattttatataaaaaagaaaagcaaagcaaaagagaagctgatagtcttgaatattttatttttttaatgaaaagaaaaaacaagaaagttatgtttcataatttcttacaacatgagccagtaaccctttaggaactctctatggagaacaggcctggtgggaaaggctttgggggctgcccccttaggaggaggctagtgctaagagggaaggcccaggtttgagagagcccagaggggcagagcccagagccttgtttggccctgatctctgacttctagagccccagctgctggcggctgctggaatatcctacctgataggattaaaaggcctagtggagctgggggctctcagtggttaaacaatgcccaacaaccaaccagctggcccttggtctcctctctttcctcctttggttaaagagcatctcagccagcttttcccaccagtggtgctgttgagatattttaaaatattgcctccgttttatcgaggagagaaataataactaaaaaatataccctttaaaaaaacctatatttctctgtctaaaaatatgggagctgagattccgttcgtggaaaaaagacaaggccaccctctcgccctcagagaggtccacctggtttgtcattgcaatgcttttcattttttttttttgttattgtttcatttcagttccgtcttgctattcttcctaatctatatccatagatctaaggggcaaacagatactagttaactgcccccacctctgtctccctgtcttctttagatcggtctgattgattttaaaagtggacccaaacttagggaattcttgatttagggtggctggtggcaaggaggggcaggggatatggggacgtgactgggacaggttcctgccttatcattttctccctaggacattcccttgtagcccccagaattgtctggcccaaattgaatagaagcagaaaaacatttagggataacatcaggccagtagaattaagcctctccacctgtcccaaccataaaaagggtctcccagctttccatctctggctctatatgctttatcccaaaacaaagcagataacgttcagacgtcggccatttagtaatttaaagcgaatttccagcagcaagcatgctttgatatctggttcagactatcatcaggaagaaaaaaaaatcccacagtacctgaaatgtgattgttgcagtgttcagtttccttgggggcctgctcccttcacaccttgagcccaagtccttttccgttggctgattcagctcccagaagagacgaggaagtgtgtggcaagggactggaaaacttcacttgcttggattaggcaaggctccactcattgttgatatttgcccagcaggaaaatcatgtaagttataccaccagaaagcaaaaggagcatggtttggtggttaaggtttagtgggatgaaggacctgtcttggtgggccgggccctcttgtgccccgtaggctaggtcttagggcaactccttgccctcctgctcagcacctccatttccccatccttggtgagataacaagctatcgcgaaaagcacttgggagatttggatgatttgagaagagtgacttaaaaaaaatgcttctgtgctctaagatatatatgtgtgtgtgtgtgctacatatatatttttaagaaaggaccatctctttaggatatatttttaaattctttgaaacacataaccaaaatggtttgattcactgactgactttgaagctgcatctgccagttacaccccaaatggctttaatcccctctcgggtctggttgccttttgcagtttgggttgtggactcagctcctgtgaggggtctggttaggagagagccatttttaaggacagggagttttatagcccttttctactttcctcccctcctcccagtccttatcaatcttttttcctttttcctgaccccctccttctggaggcagttgggagctatccttgtttatgcctcactattggcagaaaagaccccatttaaaacccagagaacactggagggggatgctctagttggttctgtgtccattttcctctgtgccaaagacagacagacagaggctgagagaggctgttcctgaatcaaagcaatagccagctttcgacacatacctggctgtctgaggaggaaggcctcctggaaactgggagctaagggcgaggcccttcccttcagaggctcctgggggattagggtgtggtgtttgccaagccaaggggtagggagccgagaaattggtctgtcggctcctggttgcactttggggaaggagaggaagtttggggctccaggtagctccctgttgtgggactgctctgtcccctgcccctactgcagagatagcactgccgagttcccttcaggcctggcagacgggcagtgaggaggggcctcagttagctctcaagggtgccttcccctcctcccaacccagacataccctctgccaaactgggaaccagcagtgctagtaactacctcacagagccccagagggcctgcttgagccttcttgctccacaggagaagctggtgcctctaggcaaccccttcctcccacctctcatcaggggtgggggttctcctttctttcccctgaagtgtttatggggagatcctagtggctttgccattcaaaccactcgactgtttgcctgtttcttgaaaaccagtagaagggaaacagcacagcctgtcacagtaattgcaggaagattgaagaaaaatcctcatcaatgccaggggacataaaagccatttcccttccaaatactcgacaatttagatgcagaacatttctctgtattcagacttagagtaacaccagctgaaaactgcagtttctttcctttggatacataaggcttctctatcggggtacgggacagggaggaggcctcatgtctgaagggggatttaggggcgagagccccagccctgaccctcggtcctgtgcaccgctttggggcacagtctgatggcgcctttgctggcgccttagtatggttgactccggatggacaaaagaaaaaaaattttttttcttgaatgaaatagcaggaagctcctcgggagcatgtgttttgattaaccgcaggtgatggatgctacgagtataaatggattaactacctcaatccttacagtaagattggaactaagggcagggactcatgcataagggtatgaatcccagccaggacaagtgagttgaggcttgtgccacaaaaggtttgtccttggggaacaggcaggcctgccaggatcccccccatatcgattgggctgggagggctggccatgaggtccccactttctgctttccttgcccatgtgtcacccctttggcctccagcttgtccctctctcactttctatagctttgttggaccagatggtgaggaaaggaatggcctcttcccttctagagggggctggctggagtgagacctggggcttggcctggaacccaccacacagccccaaagtcaggaagcctggggaaaccagagctgagacctcttcaacagggtttctttgagatcctacacctccattgggccctttttcagtcttcaatgggggcccagttggctctagaaggagaagaggtgaagcaggatcctttgccctgggggagtctgagggcgcggtccttggactcattcaggccgtctttgtagttgggggagttccactgggcgatcccagcccctccccacccaccctctaatggacctcctcatagaagccccatttcacttttgttttatctacctcttagcaaaacaatagataaattaggtagtggcagctccacttgcttaggttagggggggaaaaagatttctttttccaaaggaaaaaaatattaccttgagaatactttccaaaaaataaaattaaaaaaaaaaaaaccaaaaaaaaaaatttttttttaaaagggagacattttccagtgaccactggattgttttaatttcccaagcttttttttcccccataaataagtttcactctttggcgattttcttcacttgtttaagataacgtgctagctattccaacaggtaacagctttcacagtctgcccctggcctgtctcaccccatcccccaccctattcctgccagtgagtccttcctgtgcttctctcccttctcccctcccagccagctgacttcagtcacccctgtcccccctcccctgccaataagctcccccaggaataaaggctttgttttggggatgcttaaatcttgactggcacttcccggctgtgggggctggggagccacttgtaacatttctgtgcagattttatgttagccactgctatgtaaaagcacgttcaaaatgaatttcagcagattatgtgttaccataatgaataaacgtcctctatcaccatt

SEQ ID NO: 4296 - DNA, 3688 bp, Homo sapiens
  source 1..3688: mol_type = genomic DNA
ggggggcggaggaggaggagagacgagggcagcggaggaggcgaggagcgccgggtaccgggccgggggagccgcgggctctcggggaagagacggatgatgaacaagctttacatcgggaacctgagccccgccgtcaccgccgacgacctccggcagctctttggggacaggaagctgcccctggcgggacaggtcctgctgaagtccggctacgccttcgtggactaccccgaccagaactgggccatccgcgccatcgagaccctctcgggtaaagtggaattgcatgggaaaatcatggaagttgattactcagtctctaaaaagctaaggagcaggaaaattcagattcgaaacatccctcctcacctgcagtgggaggtgttggatggacttttggctcaatatgggacagtggagaatgtggaacaagtcaacacagacacagaaaccgccgttgtcaacgtcacatatgcaacaagagaagaagcaaaaatagccatggagaagctaagcgggcatcagtttgagaactactccttcaagatttcctacatcccggatgaagaggtgagctccccttcgccccctcagcgagcccagcgtggggaccactcttcccgggagcaaggccacgcccctgggggcacttctcaggccagacagattgatttcccgctgcggatcctggtccccacccagtttgttggtgccatcatcggaaaggagggcttgaccataaagaacatcactaagcagacccagtcccgggtagatatccatagaaaagagaactctggagctgcagagaagcctgtcaccatccatgccaccccagaggggacttctgaagcatgccgcatgattcttgaaatcatgcagaaagaggcagatgagaccaaactagccgaagagattcctctgaaaatcttggcacacaatggcttggttggaagactgattggaaaagaaggcagaaatttgaagaaaattgaacatgaaacagggaccaagataacaatctcatctttgcaggatttgagcatatacaacccggaaagaaccatcactgtgaagggcacagttgaggcctgtgccagtgctgagatagagattatgaagaagctgcgtgaggcctttgaaaatgatatgctggctgttaaccaacaagccaatctgatcccagggttgaacctcagcgcacttggcatcttttcaacaggactgtccgtgctatctccaccagcagggccccgcggagctccccccgctgccccctaccaccccttcactacccactccggatacttctccagcctgtacccccatcaccagtttggcccgttcccgcatcatcactcttatccagagcaggagattgtgaatctcttcatcccaacccaggctgtgggcgccatcatcgggaagaagggggcacacatcaaacagctggcgagattcgccggagcctctatcaagattgcccctgcggaaggcccagacgtcagcgaaaggatggtcatcatcaccgggccaccggaagcccagttcaaggcccagggacggatctttgggaaactgaaagaggaaaacttctttaaccccaaagaagaagtgaagctggaagcgcatatcagagtgccctcttccacagctggccgggtgattggcaaaggtggcaagaccgtgaacgaactgcagaacttaaccagtgcagaagtcatcgtgcctcgtgaccaaacgccagatgaaaatgaggaagtgatcgtcagaattatcgggcacttctttgctagccagactgcacagcgcaagatcagggaaattgtacaacaggtgaagcagcaggagcagaaataccctcagggagtcgcctcacagcgcagcaagtgaggctcccacaggcaccagcaaaacaacggatgaatgtagcccttccaacacctgacagaatgagaccaaacgcagccagccagatcgggagcaaaccaaagaccatctgaggaatgagaagtctgcggaggcggccagggactctgccgaggccctgagaaccccaggggccgaggaggggcggggaaggtcagccaggtttgccagaaccaccgagccccgcctcccgccccccagggcttctgcaggcttcagccatccacttcaccatccactcggatctctcctgaactcccacgacgctatcccttttagttgaactaacataggtgaacgtgttcaaagccaagcaaaatgcacaccctttttctgtggcaaatcgtctctgtacatgtgtgtacatattagaaagggaagatgttaagatatgtggcctgtgggttacacagggtgcctgcagcggtaatatattttagaaataatatatcaaataactcaactaactccaatttttaatcaattattaatttttttttctttttaaagagaaagcaggcttttctagactttaaagaataaagtctttgggaggtctcacggtgtagagaggagctttgaggccacccgcacaaaattcacccagagggaaatctcgtcggaaggacactcacggcagttctggatcacctgtgtatgtcaacagaagggataccgtctccttgaagaggaaactctgtcactcctcatgcctgtctagctcatacacccatttctctttgcttcacaggttttaaactggttttttgcatactgctatataattctctgtctctctctgtttatctctcccctccctcccctccccttcttctccatctccattcttttgaatttcctcatccctccatctcaatcccgtatctacgcacccccccccccccaggcaaagcagtgctctgagtatcacatcacacaaaaggaacaaaagcgaaacacacaaaccagcctcaacttacacttggttactcaaaagaacaagagtcaatggtacttgtcctagcgttttggaagaggaaaacaggaacccaccaaaccaaccaatcaaccaaacaaagaaaaaattccacaatgaaagaatgtattttgtctttttgcattttggtgtataagccatcaatattcagcaaaatgattcctttctttaaaaaaaaaaaatgtggaggaaagtagaaatttaccaaggttgttggcccagggcgttaaattcacagatttttttaacgagaaaaacacacagaagaagctacctcaggtgtttttacctcagcaccttgctcttgtgtttcccttagagattttgtaaagctgatagttggagcatttttttatttttttaataaaaatgagttggaaaaaaaataagatatcaactgccagcctggagaaggtgacagtccaagtgtgcaacagctgttctgaattgtcttccgctagccaagaacctatatggccttcttttggacaaaccttgaaaatgtttatttaaaaaaaaaaaagatgacaaagaaaaacagagagagagaatattggagatgtcctgaattttaatagggtacgcgccattagggctttttgcgctaaaggatgaacatgtactggtttatgtggacaagccattataccaccagactgcaatgccagtttcctctactgcaaacagtgttctgtgacaaaaaaaaaaaaaaaaaaaagaaaaaaaaagaaaaaacagaaatatatccagctaacaaga

SEQ ID NO: 4297 - DNA, 3358 bp, Homo sapiens
  source 1..3358: mol_type = genomic DNA
atgttctcatgtcctggacactaccacgttgatggctttctaaatccagggagcaggaaaattcagattcgaaacatccctcctcacctgcagtgggaggtgttggatggacttttggctcaatatgggacagtggagaatgtggaacaagtttttgccttttccctagtcaacacagacacagaaaccgccgttgtcaacgtcacatatgcaacaagagaagaagcaaaaatagccatggagaagctaagcgggcatcagtttgagaactactccttcaagatttcctacatcccggatgaagaggtgagctccccttcgccccctcagcgagcccagcgtggggaccactcttcccgggagcaaggccacgcccctgggggcacttctcaggccagacagattgatttcccgctgcggatcctggtccccacccagtttgttggtgccatcatcggaaaggagggcttgaccataaagaacatcactaagcagacccagtcccgggtagatatccatagaaaagagaactctggagctgcagagaagcctgtcaccatccatgccaccccagaggggacttctgaagcatgccgcatgattcttgaaatcatgcagaaagaggcagatgagaccaaactagccgaagagattcctctgaaaatcttggcacacaatggcttggttggaagactgattggaaaagaaggcagaaatttgaagaaaattgaacatgaaacagggaccaagataacaatctcatctttgcaggatttgagcatatacaacccggaaagaaccatcactgtgaagggcacagttgaggcctgtgccagtgctgagatagagattatgaagaagctgcgtgaggcctttgaaaatgatatgctggctgttaaccaacaagccaatctgatcccagggttgaacctcagcgcacttggcatcttttcaacaggactgtccgtgctatctccaccagcagggccccgcggagctccccccgctgccccctaccaccccttcactacccactccggatacttctccagcctgtacccccatcaccagtttggcccgttcccgcatcatcactcttatccagagcaggagattgtgaatctcttcatcccaacccaggctgtgggcgccatcatcgggaagaagggggcacacatcaaacagctggcgagattcgccggagcctctatcaagattgcccctgcggaaggcccagacgtcagcgaaaggatggtcatcatcaccgggccaccggaagcccagttcaaggcccagggacggatctttgggaaactgaaagaggaaaacttctttaaccccaaagaagaagtgaagctggaagcgcatatcagagtgccctcttccacagctggccgggtgattggcaaaggtggcaagaccgtgaacgaactgcagaacttaaccagtgcagaagtcatcgtgcctcgtgaccaaacgccagatgaaaatgaggaagtgatcgtcagaattatcgggcacttctttgctagccagactgcacagcgcaagatcagggaaattgtacaacaggtgaagcagcaggagcagaaataccctcagggagtcgcctcacagcgcagcaagtgaggctcccacaggcaccagcaaaacaacggatgaatgtagcccttccaacacctgacagaatgagaccaaacgcagccagccagatcgggagcaaaccaaagaccatctgaggaatgagaagtctgcggaggcggccagggactctgccgaggccctgagaaccccaggggccgaggaggggcggggaaggtcagccaggtttgccagaaccaccgagccccgcctcccgccccccagggcttctgcaggcttcagccatccacttcaccatccactcggatctctcctgaactcccacgacgctatcccttttagttgaactaacataggtgaacgtgttcaaagccaagcaaaatgcacaccctttttctgtggcaaatcgtctctgtacatgtgtgtacatattagaaagggaagatgttaagatatgtggcctgtgggttacacagggtgcctgcagcggtaatatattttagaaataatatatcaaataactcaactaactccaatttttaatcaattattaatttttttttctttttaaagagaaagcaggcttttctagactttaaagaataaagtctttgggaggtctcacggtgtagagaggagctttgaggccacccgcacaaaattcacccagagggaaatctcgtcggaaggacactcacggcagttctggatcacctgtgtatgtcaacagaagggataccgtctccttgaagaggaaactctgtcactcctcatgcctgtctagctcatacacccatttctctttgcttcacaggttttaaactggttttttgcatactgctatataattctctgtctctctctgtttatctctcccctccctcccctccccttcttctccatctccattcttttgaatttcctcatccctccatctcaatcccgtatctacgcacccccccccccccaggcaaagcagtgctctgagtatcacatcacacaaaaggaacaaaagcgaaacacacaaaccagcctcaacttacacttggttactcaaaagaacaagagtcaatggtacttgtcctagcgttttggaagaggaaaacaggaacccaccaaaccaaccaatcaaccaaacaaagaaaaaattccacaatgaaagaatgtattttgtctttttgcattttggtgtataagccatcaatattcagcaaaatgattcctttctttaaaaaaaaaaaatgtggaggaaagtagaaatttaccaaggttgttggcccagggcgttaaattcacagatttttttaacgagaaaaacacacagaagaagctacctcaggtgtttttacctcagcaccttgctcttgtgtttcccttagagattttgtaaagctgatagttggagcatttttttatttttttaataaaaatgagttggaaaaaaaataagatatcaactgccagcctggagaaggtgacagtccaagtgtgcaacagctgttctgaattgtcttccgctagccaagaacctatatggccttcttttggacaaaccttgaaaatgtttatttaaaaaaaaaaaagatgacaaagaaaaacagagagagagaatattggagatgtcctgaattttaatagggtacgcgccattagggctttttgcgctaaaggatgaacatgtactggtttatgtggacaagccattataccaccagactgcaatgccagtttcctctactgcaaacagtgttctgtg

SEQ ID NO: 4298 - DNA, 3291 bp, Homo sapiens
  source 1..3291: mol_type = genomic DNA
cggaggaggcgaggagcgccgggtaccgggccgggggagccgcgggctctcggggaagagacggatgatgaacaagctttacatcgggaacctgagccccgccgtcaccgccgacgacctccggcagctctttggggacaggaagctgcccctggcgggacaggtcctgctgaagtccggctacgccttcgtggactaccccgaccagaactgggccatccgcgccatcgagaccctctcgggtaaagtggaattgcatgggaaaatcatggaagttgattactcagtctctaaaaagctaaggagcaggaaaattcagattcgaaacatccctcctcacctgcagtgggaggtgttggatggacttttggctcaatatgggacagtggagaatgtggaacaagtcaacacagacacagaaaccgccgttgtcaacgtcacatatgcaacaagagaagaagcaaaaatagccatggagaagctaagcgggcatcagtttgagaactactccttcaagatttcctacatcccggatgaagaggtgagctccccttcgccccctcagcgagcccagcgtggggaccactcttcccgggagcaaggccacgcccctgggggcacttctcaggccagacagattgatttcccgctgcggatcctggtccccacccagtttgttggtgccatcatcggaaaggagggcttgaccataaagaacatcactaagcagacccagtcccgggtagatatccatagaaaagagaactctggagctgcagagaagcctgtcaccatccatgccaccccagaggggacttctgaagcatgccgcatgattcttgaaatcatgcagaaagaggcagatgagaccaaactagccgaagagattcctctgaaaatcttggcacacaatggcttggttggaagactgattggaaaagaaggcagaaatttgaagaaaattgaacatgaaacagggaccaagataacaatctcatctttgcaggatttgagcatatacaacccggaaagaaccatcactgtgaagggcacagttgaggcctgtgccagtgctgagatagagattatgaagaagctgcgtgaggcctttgaaaatgatatgctggctgttaacacccactccggatacttctccagcctgtacccccatcaccagtttggcccgttcccgcatcatcactcttatccagagcaggagattgtgaatctcttcatcccaacccaggctgtgggcgccatcatcgggaagaagggggcacacatcaaacagctggcgagattcgccggagcctctatcaagattgcccctgcggaaggcccagacgtcagcgaaaggatggtcatcatcaccgggccaccggaagcccagttcaaggcccagggacggatctttgggaaactgaaagaggaaaacttctttaaccccaaagaagaagtgaagctggaagcgcatatcagagtgccctcttccacagctggccgggtgattggcaaaggtggcaagaccgtgaacgaactgcagaacttaaccagtgcagaagtcatcgtgcctcgtgaccaaacgccagatgaaaatgaggaagtgatcgtcagaattatcgggcacttctttgctagccagactgcacagcgcaagatcagggaaattgtacaacaggtgaagcagcaggagcagaaataccctcagggagtcgcctcacagcgcagcaagtgaggctcccacaggcaccagcaaaacaacggatgaatgtagcccttccaacacctgacagaatgagaccaaacgcagccagccagatcgggagcaaaccaaagaccatctgaggaatgagaagtctgcggaggcggccagggactctgccgaggccctgagaaccccaggggccgaggaggggcggggaaggtcagccaggtttgccagaaccaccgagccccgcctcccgccccccagggcttctgcaggcttcagccatccacttcaccatccactcggatctctcctgaactcccacgacgctatcccttttagttgaactaacataggtgaacgtgttcaaagccaagcaaaatgcacaccctttttctgtggcaaatcgtctctgtacatgtgtgtacatattagaaagggaagatgttaagatatgtggcctgtgggttacacagggtgcctgcagcggtaatatattttagaaataatatatcaaataactcaactaactccaatttttaatcaattattaatttttttttctttttaaagagaaagcaggcttttctagactttaaagaataaagtctttgggaggtctcacggtgtagagaggagctttgaggccacccgcacaaaattcacccagagggaaatctcgtcggaaggacactcacggcagttctggatcacctgtgtatgtcaacagaagggataccgtctccttgaagaggaaactctgtcactcctcatgcctgtctagctcatacacccatttctctttgcttcacaggttttaaactggttttttgcatactgctatataattctctgtctctctctgtttatctctcccctccctcccctccccttcttctccatctccattcttttgaatttcctcatccctccatctcaatcccgtatctacgcacccccccccccccaggcaaagcagtgctctgagtatcacatcacacaaaaggaacaaaagcgaaacacacaaaccagcctcaacttacacttggttactcaaaagaacaagagtcaatggtacttgtcctagcgttttggaagaggaaaacaggaacccaccaaaccaaccaatcaaccaaacaaagaaaaaattccacaatgaaagaatgtattttgtctttttgcattttggtgtataagccatcaatattcagcaaaatgattcctttctttaaaaaaaaaaaatgtggaggaaagtagaaatttaccaaggttgttggcccagggcgttaaattcacagatttttttaacgagaaaaacacacagaagaagctacctcaggtgtttttacctcagcaccttgctcttgtgtttcccttagagattttgtaaagctgatagttggagcatttttttatttttttaataaaaatgagttggaaaaaaaataagatatcaactgccagcctggagaaggtgacagtccaagtgtgcaacagctgttctgaattgtcttccgctagccaagaacctatatggccttcttttggacaaaccttgaaaatgtttatttaaaaaaaaaaaa

SEQ ID NO: 4299 - DNA, 4250 bp, Homo sapiens
  source 1..4250: mol_type = genomic DNA
ggccgaagccaaaggggttgggaaggaagagacaaaaagtagttttttcccctcctcctcctcctttctcttgctaatcccgcctcctcctaagacttaggaagactggtggatgcgtttgggttgtagctaggctttttcttttctttctcttttaaaacacatctagacaaggaaaaaacaagcctcggatctgatttttcactcctcgttcttgtgcttggttcttactgtgtttgtgtattttaaaggcgagaagacgaggggaacaaaaccagctggatccatccatcaccgtgggtggttttaatttttcgttttttctcgttatttttttttaaacaaccactcttcacaatgaacaaactgtatatcggaaacctcagcgagaacgccgccccctcggacctagaaagtatcttcaaggacgccaagatcccggtgtcgggacccttcctggtgaagactggctacgcgttcgtggactgcccggacgagagctgggccctcaaggccatcgaggcgctttcaggtaaaatagaactgcacgggaaacccatagaagttgagcactcggtcccaaaaaggcaaaggattcggaaacttcagatacgaaatatcccgcctcatttacagtgggaggtgctggatagtttactagtccagtatggagtggtggagagctgtgagcaagtgaacactgactcggaaactgcagttgtaaatgtaacctattccagtaaggaccaagctagacaagcactagacaaactgaatggatttcagttagagaatttcaccttgaaagtagcctatatccctgatgaaatggccgcccagcaaaaccccttgcagcagccccgaggtcgccgggggcttgggcagaggggctcctcaaggcaggggtctccaggatccgtatccaagcagaaaccatgtgatttgcctctgcgcctgctggttcccacccaatttgttggagccatcataggaaaagaaggtgccaccattcggaacatcaccaaacagacccagtctaaaatcgatgtccaccgtaaagaaaatgcgggggctgctgagaagtcgattactatcctctctactcctgaaggcacctctgcggcttgtaagtctattctggagattatgcataaggaagctcaagatataaaattcacagaagagatccccttgaagattttagctcataataactttgttggacgtcttattggtaaagaaggaagaaatcttaaaaaaattgagcaagacacagacactaaaatcacgatatctccattgcaggaattgacgctgtataatccagaacgcactattacagttaaaggcaatgttgagacatgtgccaaagctgaggaggagatcatgaagaaaatcagggagtcttatgaaaatgatattgcttctatgaatcttcaagcacatttaattcctggattaaatctgaacgccttgggtctgttcccacccacttcagggatgccacctcccacctcagggcccccttcagccatgactcctccctacccgcagtttgagcaatcagaaacggagactgttcatctgtttatcccagctctatcagtcggtgccatcatcggcaagcagggccagcacatcaagcagctttctcgctttgctggagcttcaattaagattgctccagcggaagcaccagatgctaaagtgaggatggtgattatcactggaccaccagaggctcagttcaaggctcagggaagaatttatggaaaaattaaagaagaaaactttgttagtcctaaagaagaggtgaaacttgaagctcatatcagagtgccatcctttgctgctggcagagttattggaaaaggaggcaaaacggtgaatgaacttcagaatttgtcaagtgcagaagttgttgtccctcgtgaccagacacctgatgagaatgaccaagtggttgtcaaaataactggtcacttctatgcttgccaggttgcccagagaaaaattcaggaaattctgactcaggtaaagcagcaccaacaacagaaggctctgcaaagtggaccacctcagtcaagacggaagtaaaggctcaggaaacagcccaccacagaggcagatgccaaaccaaagacagattgcttaaccaacagatgggcgctgaccccctatccagaatcacatgcacaagtttttacctagccagttgtttctgaggaccaggcaacttttgaactcctgtctctgtgagaatgtatactttatgctctctgaaatgtatgacacccagctttaaaacaaacaaacaaacaaacaaaaaaagggtgggggagggagggaaagagaagagctctgcacttccctttgttgtagtctcacagtataacagatattctaattcttcttaatattcccccataatgccagaaattggcttaatgatgctttcactaaattcatcaaatagattgctcctaaatccaattgttaaaattggatcagaataattatcacaggaacttaaatgttaagccattagcatagaaaaactgttctcagttttatttttacctaacactaacatgagtaacctaagggaagtgctgaatggtgttggcaggggtattaaacgtgcatttttactcaactacctcaggtattcagtaatacaatgaaaagcaaaattgttccttttttttgaaaattttatatactttataatgatagaagtccaaccgttttttaaaaaataaatttaaaatttaacagcaatcagctaacaggcaaattaagatttttacttctggctggtgacagtaaagctggaaaattaatttcagggttttttgaggcttttgacacagttattagttaaatcaaatgttcaaaaatacggagcagtgcctagtatctggagagcagcactaccatttattctttcatttatagttgggaaagtttttgacggtactaacaaagtggtcgcaggagattttggaacggctggtttaaatggcttcaggagacttcagttttttgtttagctacatgattgaatgcataataaatgctttgtgcttctgactatcaatacctaaagaaagtgcatcagtgaagagatgcaagactttcaactgactggcaaaaagcaagctttagcttgtcttataggatgcttagtttgccactacacttcagaccaatgggacagtcatagatggtgtgacagtgtttaaacgcaacaaaaggctacatttccatggggccagcactgtcatgagcctcactaagctattttgaagatttttaagcactgataaattaaaaaaaaaaaattagactccaccttaagtagtaaagtataacaggatttctgtatactgtgcaatcagttctttgaaaaaaaagtcaaaagatagagaatacaagaaaagtttttgggatataatttgaatgactgtgaaaacatatgacctttgataacgaactcatttgctcactccttgacagcaaagcccagtacgtacaattgtgttgggtgtgggtggtctccaaggccacgctgctctctgaattgattttttgagttttgtttgtaagatgatcacagtcatgttacactgatctaaaggacatatatataaccctttaaaaaaaaaatcactgcctcattcttatttcaagatgaatttctatacagactagatgtttttctgaagatcaattagacattttgaaaatgatttaaagtgttttccttaatgttctctgaaaacaagtttcttttgtagttttaaccaaaaaagtgccctttttgtcactggattctcctagcattcatgatttttttttcatacaatgaattaaaattgctaaaatcatggactggctttctggttggatttcaggtaagatgtgtttaaggccagagcttttctcagtatttgatttttttccccaatatttgattttttaaaaatatacacataggtgctgcatttatatctgctggtttaaattctgtcatatttcacttctagccttttagtatggcaaatcatattttacttttacttaagcatttgtaatttggagtatctggtactagctaagaaataattctataattgagttttgtactcaccatatatggatcattcctcatgtataatgtgccccaaatgcagcttcattttccagataccttgacgcagaataaattttttcatcatttaggtgca

SEQ ID NO: 4300 - DNA, 2757 bp, Homo sapiens
  source 1..2757: mol_type = genomic DNA
gctggctgcgcacgcgcgccgcctcatttccggtgctctctctcgctgggtcgctcgggtcggcttcggtcgctaccgctcccgctctgccacccccgccaaccgccgctcgggcctccgtcgctgccgcgtcgctttctcgctccttggatcgcacatcctcccagatgcagcgccgggacgaccccgccgcgcgcatgagccggtcttcgggccgtagcggctccatggacccctccggtgcccacccctcggtgcgtcagacgccgtctcggcagccgccgctgcctcaccggtcccggggaggcggagggggatcccgcgggggcgcccgggcctcgcccgccacgcagccgccaccgctgctgccgccctcggccacgggtcccgacgcgacagtgggcgggccagcgccgaccccgctgctgcccccctcggccacagcctcggtcaagatggagccagagaacaagtacctgcccgaactcatggccgagaaggactcgctcgacccgtccttcactcacgccatgcagctgctgacggcagaaattgagaagattcagaaaggagactcaaaaaaggatgatgaggagaattacttggatttattttctcataagaacatgaaactgaaagagcgagtgctgatacctgtcaagcagtatcccaagttcaattttgtggggaagattcttggaccacaagggaatacaatcaaaagactgcaggaagagactggtgcaaagatctctgtattgggaaagggctcaatgagagacaaagccaaggaggaagagctgcgcaaaggtggagaccccaaatatgcccacttgaatatggatctgcatgtcttcattgaagtctttggacccccatgtgaggcttatgctcttatggcccatgccatggaggaagtcaagaaatttctagtaccggatatgatggatgatatctgtcaggagcaatttctagagctgtcctacttgaatggagtacctgaaccctctcgtggacgtggggtgccagtgagaggccggggagctgcacctcctccaccacctgttcccaggggccgtggtgttggaccacctcggggggctttggtacgtggtacaccagtaaggggagccatcaccagaggtgccactgtgactcgaggcgtgccacccccacctactgtgaggggtgctccagcaccaagagcacggacagcgggcatccagaggatacctttgcctccacctcctgcaccagaaacatatgaagaatatggatatgatgatacatacgcagaacaaagttacgaaggctacgaaggctattacagccagagtcaaggggactcagaatattatgactatggacatggggaggttcaagattcttatgaagcttatggccaggacgactggaatgggaccaggccgtcgctgaaggcccctcctgctaggccagtgaagggagcatacagagagcacccatatggacgttattaaaaacaaacatgaggggaaaatatcagttatgagcaaagttgttactgatttcttgtatctcccaggattcctgttgctttacccacaacagacaagtaattgtctaagtgtttttcttcgtggtccccttcttctccccaccttattccattcttaactctgcattctggcttctgtatgtagtattttaaaatgagttaaaatagatttaggaatattgaattaattttttaagtgtgtagatgcttttttctttgttgtttaaatataaacagaagtgtaccttttataataaaaaaaagaagttgagtaaaaaaaaaaaacacacaaacctgttagtttcaaaaatgacattgcttgcttaaaggttctgaagtaaaggcttgttaagtttctcttagttttgatttgaggcatcccgtaaagttgtagttgcagaatcccaaactaggctacatttcaaaattcagggctgtttaagatttaaaatcacaaacattaacggcagtaggcaccaccatgtaaaagtgagctcagacgtctctaaaaaatgtttcctttataaaagcacatggcggttgaatcttaaggttaaattttaatatgaaagatcctcatgaattaaatagttgatgcaatttttaacgttaattgatataaaaaaaaaaacaacaaaattaggcttgtaaaactgactttttcattacgtgggttttgaaatctagccccagacatactgtgttgagagatacttagagggagggagtaggttttgaagaggttgatggtggtggggagggaaggcctcctgaattgagtttgatgcagagctttttagccatgaagaatctttcagtcatagtactaataattaaattttcagtatttaaaaagacaaagtattttgtccatttgagattctgcactccatgaaaagttcacttggacgctggggccaaaagctgttgattttcttaagttgacggttgtcaatatatcgaactgttcccaagttagtcaagtatgtctcaacactagcatgatataaaaagggacactgcagctgaatgaaaaaggaatcaaaatccactttgtacataagttaaagtcctaattggatttgtaccgtcctcccattttgttctcggaagattaaatgctacatgtgtaagtctgcctaaataggtagcttaaacttatgtcaaaatgtctgcagcagtttgtcaataaagtttagtccttttttaatcaaagtaaa

SEQ ID NO: 4301 - DNA, 1215 bp, Homo sapiens
  source 1..1215: mol_type = genomic DNA
atgcagcgccgggacgaccccgccgcgcgcatgagccggtcttcgggccgtagcggctccatggacccctccggtgcccacccctcggtgcgtcagacgccgtctcggcagccgccgctgcctcaccggtcccggggaggcggagggggatcccgcgggggcgcccgggcctcgcccgccacgcagccgccaccgctgctgccgccctcggccacgggtcccgacgcgacagtgggcgggccagcgccgaccccgctgctgcccccctcggccacagcctcggtcaagatggagccagagaacaagtacctgcccgaactcatggccgagaaggactcgctcgacccgtccttcactcacgccatgcagctgctgacggcagaaattgagaagattcagaaaggagactcaaaaaaggatgatgaggagaattacttggatttattttctcataagaacatgaaactgaaagagcgagtgctgatacctgtcaagcagtatcccaaggaggaagagctgcgcaaaggtggagaccccaaatatgcccacttgaatatggatctgcatgtcttcattgaagtctttggacccccatgtgaggcttatgctcttatggcccatgccatggaggaagtcaagaaatttctagtaccggatatgatggatgatatctgtcaggagcaatttctagagctgtcctacttgaatggagtacctgaaccctctcgtggacgtggggtgccagtgagaggccggggagctgcacctcctccaccacctgttcccaggggccgtggtgttggaccacctcggggggctttggtacgtggtacaccagtaaggggagccatcaccagaggtgccactgtgactcgaggcgtgccacccccacctactgtgaggggtgctccagcaccaagagcacggacagcgggcatccagaggatacctttgcctccacctcctgcaccagaaacatatgaagaatatggatatgatgatacatacgcagaacaaagttacgaaggctacgaaggctattacagccagagtcaaggggactcagaatattatgactatggacatggggaggttcaagattcttatgaagcttatggccaggacgactggaatgggaccaggccgtcgctgaaggcccctcctgctaggccagtgaagggagcatacagagagcacccatatggacgttattaa

SEQ ID NO: 4302 - DNA, 2507 bp, Homo sapiens
  source 1..2507: mol_type = genomic DNA
atgcagcgccgggacgaccccgccgcgcgcatgagccggtcttcgggccgtagcggctccatggacccctccggtgcccacccctcggtgcgtcagacgccgtctcggcagccgccgccaccgctgctgccgccctcggccacgggtcccgacgcgacagtgggcgggccagcgccgaccccgctgctgcccccctcggccacagcctcggtcaagatggagccagagaacaagtacctgcccgaactcatggccgagaaggactcgctcgacccgtccttcactcacgccatgcagctgctgacggcagaaattgagaagattcagaaaggagactcaaaaaaggatgatgaggagaattacttggatttattttctcataagaacatgaaactgaaagagcgagtgctgatacctgtcaagcagtatcccaagttcaattttgtggggaagattcttggaccacaagggaatacaatcaaaagactgcaggaagagactggtgcaaagatctctgtattgggaaagggctcaatgagagacaaagccaaggaggaagagctgcgcaaaggtggagaccccaaatatgcccacttgaatatggatctgcatgtcttcattgaagtctttggacccccatgtgaggcttatgctcttatggcccatgccatggaggaagtcaagaaatttctagtaccggatatgatggatgatatctgtcaggagcaatttctagagctgtcctacttgaatggagtacctgaaccctctcgtggacgtggggtgccagtgagaggccggggagctgcacctcctccaccacctgttcccaggggccgtggtgttggaccacctcggggggctttggtacgtggtacaccagtaaggggagccatcaccagaggtgccactgtgactcgaggcgtgccacccccacctactgtgaggggtgctccagcaccaagagcacggacagcgggcatccagaggatacctttgcctccacctcctgcaccagaaacatatgaagaatatggatatgatgatacatacgcagaacaaagttacgaaggctacgaaggctattacagccagagtcaaggggactcagaatattatgactatggacatggggaggttcaagattcttatgaagcttatggccaggacgactggaatgggaccaggccgtcgctgaaggcccctcctgctaggccagtgaagggagcatacagagagcacccatatggacgttattaaaaacaaacatgaggggaaaatatcagttatgagcaaagttgttactgatttcttgtatctcccaggattcctgttgctttacccacaacagacaagtaattgtctaagtgtttttcttcgtggtccccttcttctccccaccttattccattcttaactctgcattctggcttctgtatgtagtattttaaaatgagttaaaatagatttaggaatattgaattaattttttaagtgtgtagatgcttttttctttgttgtttaaatataaacagaagtgtaccttttataataaaaaaaagaagttgagtaaaaaaaaaaaacacacaaacctgttagtttcaaaaatgacattgcttgcttaaaggttctgaagtaaaggcttgttaagtttctcttagttttgatttgaggcatcccgtaaagttgtagttgcagaatcccaaactaggctacatttcaaaattcagggctgtttaagatttaaaatcacaaacattaacggcagtaggcaccaccatgtaaaagtgagctcagacgtctctaaaaaatgtttcctttataaaagcacatggcggttgaatcttaaggttaaattttaatatgaaagatcctcatgaattaaatagttgatgcaatttttaacgttaattgatataaaaaaaaaaacaacaaaattaggcttgtaaaactgactttttcattacgtgggttttgaaatctagccccagacatactgtgttgagagatacttagagggagggagtaggttttgaagaggttgatggtggtggggagggaaggcctcctgaattgagtttgatgcagagctttttagccatgaagaatctttcagtcatagtactaataattaaattttcagtatttaaaaagacaaagtattttgtccatttgagattctgcactccatgaaaagttcacttggacgctggggccaaaagctgttgattttcttaagttgacggttgtcaatatatcgaactgttcccaagttagtcaagtatgtctcaacactagcatgatataaaaagggacactgcagctgaatgaaaaaggaatcaaaatccactttgtacataagttaaagtcctaattggatttgtaccgtcctcccattttgttctcggaagattaaatgctacatgtgtaagtctgcctaaataggtagcttaaacttatgtcaaaatgtctgcagcagtttgtcaataaagtttagtcctttttta

SEQ ID NO: 4303 - DNA, 2058 bp, Homo sapiens
  source 1..2058: mol_type = genomic DNA
gcgtcctgttcccgcctctccagttaaggccgctggtgtgagccggggctctgcgcgagcgagggacgacggaagggacgggcaggtgtgggcgcggggccacgcagcccgacggcgggagtcgcaggtgctgggtgcatgggccagtgaggacgcacagagatccctcgccgcgcggaggaggagcagcgcgggagccaggcgctgccccaagaccctgcctgcgtccgagcgagcggaacctcgcgcttcgcccggggacaatccgaagtccgcgctatggaagaggagaaatatttgcctgagctgatggcagagaaagatagcctggatccatcttttgtgcatgcgtcgcgccttttggcagaagaaattgaaaagtttcaaggttctgatggaaaaaaggaagacgaagaaaagaagtatcttgatgtcatcagcaacaaaaacataaagctctcagaaagagtactgattcctgtcaagcagtatccaaagttcaattttgtggggaaattgcttggaccaagaggaaactccttgaagaggctacaggaagaaacaggtgctaaaatgtctatcctgggcaaaggatcaatgagagataaagctaaggaagaagaactaaggaagagtggggaagccaaatatgcccacttgagtgatgagcttcatgtattaattgaagtgtttgctccacctggggaagcttattcacgtatgagtcatgcattggaagagattaaaaaattcctggttcctgactacaatgatgaaattcgtcaggaacaactacgtgaattatcttacttaaatggctcagaggactctggtcgtggcagaggtattagaggcagagggatcagaatagctcccacagctccttcaaggggccgtgggggtgccattcctcctcccccaccacctggacgaggtgttctcacccctcggggaagcactgtaacccgtggagcgcttccagtgccacctgtagcaagaggtgtccctacccctcgagcccggggggcaccaacagtgccaggatacagggcacctcctcctccagcccatgaagcttatgaagaatatggttatgatgatggctacgggggtgaatatgatgaccagacctatgagacttatgataacagctatgcgacccaaacacaaagtgtgcctgaatactatgactacggtcatggagtaagtgaggatgcctatgacagctacgcaccagaagaatgggccacaacccgctctagcttgaaggcaccaccgcaaaggtcagccagagggggatacagggaacacccctatggtagatattgaaggtccttcccacctgtgacctcacctcaaagacaattcatagcctgtggtctccacataaacagcaacaagacaagtaatagtcctttttttgtttgtttgtttctattctagggataactgctcatgattactcccatatatttctagtatttccctctgtactgttggcgtgacattgacactagtattattttacaaaacagactgaaaaagacattagcaagcatagtctataaacctttcagtaggatgatattctcttggttgtttttcattgttgtgtgtaatcttttttttttctttttcttttttttttttttgaggaaaagcatgaatttgttaacagattttgagtctcaaccaactagcagaaactttgtttagggttgctaaaagactgtaatatgatttttgaactagctgataataaagttgtagataagatgttttaacctgtcttttaatatctgttagttagacaaagatgtttgatattaagtttgtaaatttaattttaatgctgttttaatggggttgaaaacaagcagctactgtatgtatgtagctaactgaatttgttcagtgttttaacctgtatttgttaaaaaagaaaaaaaaacacacataaagttccatgtgtaagcttctctaaataggaaaccacaatttgtcaaatatgtttgccataatttgtcaataaagctgaaaacttttgtaaaaattaaa

SEQ ID NO: 4304 - DNA, 1230 bp, Homo sapiens
  source 1..1230: mol_type = genomic DNA
gcgtcctgttcccgcctctccagttaaggccgctggtgtgagccggggctctgcgcgagcgagggacgacggaagggacgggcaggtgtgggcgcggggccacgcagcccgacggcgggagtcgcaggtgctgggtgcatgggccagtgaggacgcacagagatccctcgccgcgcggaggaggagcagcgcgggagccaggcgctgccccaagaccctgcctgcgtccgagcgagcggaacctcgcgcttcgcccggggacaatccgaagtccgcgctatggaagaggagaaatatttgcctgagctgatggcagagaaagatagcctggatccatcttttgtgcatgcgtcgcgccttttggcagaagaaattgaaaagtttcaaggttctgatggaaaaaaggaagacgaagaaaagaagtatcttgatgtcatcagcaacaaaaacataaagctctcagaaagagtactgattcctgtcaagcagtatccaaagttcaattttgtggggaaattgcttggaccaagaggaaactccttgaagaggctacaggaagaaacaggtgctaaaatgtctatcctgggcaaaggatcaatgagagataaagctaaggaagaagaactaaggaagagtggggaagccaaatatgcccacttgagtgatgagcttcatgtattaattgaagtgtttgctccacctggggaagcttattcacgtatgagtcatgcattggaagagattaaaaaattcctggttcctgactacaatgatgaaattcgtcaggaacaactacgtgaattatcttacttaaatggctcagaggactctggtcgtggcagaggtattagaggcagagggatcagaatagctcccacagctccttcaaggggccgtgggggtgccattcctcctcccccaccacctggacgaggtgttctcacccctcggggaagcactgtaacccgtggagcgcttccagtgccacctgtagcaagaggtgtccctacccctcgagcccggggggcaccaacagtgccaggatacagggcacctcctcctccagcccatgaagcttatgaagaatatccatcattaccactttccttgttttttgatacggtggcaaaatctcaccagcattgtgataacgaagtaccacaaactggttcaaccagacttaacccaggacgaagcttttttctggcatggaggtgggagtgggactga

SEQ ID NO: 4305 - DNA, 1977 bp, Homo sapiens
  source 1..1977: mol_type = genomic DNA
gagtgcgcggggcggcgcgcggcgtgcaggtcgcagctgtggctcgggtgctggcaggtgctggcgggactggcggggatcgccgtggactgcctcaggggcgccgcagcccgctcggcccgagggcccgcctaaccgcgccgcccgcgcccgctcctcctcggcccgcgcccggagcgcgggggccgccggcgctgggtactcggcggccaccggggatcggggctgagcggtcggttcccgcccccgtgccgccgccgccgccttccggccgaccgcccggcttggccgctgctgccgcgtctggcccccgggtccccgccgctgggggcgcgggcggggtcgggggttgccgggcgccgccccccgtgcgcctggagtccacatcccgggcccggcggccggcgagcatggaggagaagtacctgcccgagctgatggcggagaaggactccctggacccctccttcacgcacgccctgcgcctggtgaaccaagaaatagaaaagtttcaaaaaggagaaggcaaggatgaagaaaagtacatcgatgtggtgattaataagaacatgaagctgggacagaaagtgttaattcccgtaaaacagttccctaagttcaactttgtggggaaacttttgggtccacgtggcaattctctgaagcgtttacaagaagaaaccttgacaaaaatgtccatccttgggaaaggttccatgagagacaaggccaaggaagaagagttgaggaaaagtggagaagcgaagtacttccatctcaatgatgatctccatgttctcattgaagtgtttgccccacctgcagaagcttatgccaggatgggacatgctttggaagaaatcaaaaagttcctcatccctgattataatgatgagatcaggcaagcacagctccaggagttaacatatttgaatggtggttcagaaaatgcagatgttccagtggttcgagggaaacccaccttgcgtacaagaggtgtaccagccccagcaataaccaggggaaggggaggagttacagcccggccagttggagttgtagtaccacgagggacgccaactcccagaggagtcctgtccacccgagggccagtgagtcggggaagaggacttctcactcccagagcaagaggagtccccccaactgggtacagacctccaccgccacccccgacacaagagacttatggagaatatgactatgatgatggatatggcactgcttatgatgaacagagttatgattcctatgataacagctatagcaccccagcccaaagtggtgctgattactatgattacggacatggactcagtgaggagacttatgattcctacgggcaagaagagtggactaactcaagacacaaggcaccttcagcgaggacagcaaagggcgtctacagagaccagccatatggcagatactgattgtactgtctgatgttgtgaaatagccaatctccaccagtcctgtatactgttcaaagtaatttttttctatgaacaatccctttttaaataaatcagaatgcttaaaatctgaatggatggaacttaaaactactttgttgaaacatcaacctgggcagaaaaaaaaaaaaaaagacatgtaaaattttgttatttccagtctgtatatgaaaaaataggtcatcaaaaggaaaaaaaataactttgattaactagtgttaaacaaaaaataggtttactaaatatgttaatctattcttttaacataagcctcacctttcattttaaaggtttccatagaatttagttattttatctttcagccatatgctagtttttttttctcttgccaacatgcgtaaaaagggaagccaattacaagtgcaaataatgtggtattcttttgtaactcaagtcttgaaatgttctgtagtgttaagcaaagtctcctcttgcttgatactaaataaacttttgaaagaaa

SEQ ID NO: 4306 - DNA, 9463 bp, Homo sapiens
  source 1..9463: mol_type = genomic DNA
tgaactgaggcgaactccgccgccaagtgagtgaggaggaggaggaggagaaggaggaggaggaagaggaggagcgcagtcggagcgcggcggcagcggcagaggcgccgcggcggggaccagcccagagagaccccccgagcccgcggcacaggcggcggcggcgctgagcgggctcgaccagccgagcgagcggcggccccggctcctcctcgtccggcgccagcagcccgcgccccgcgcccgcactcggccagccgagacccgcctcccgcccgcccgccggcctcgtgagggacgcgccgagccgggcggccgagagcggcggcggctgggagcgcgtcgggcccgggcggaaagtgcctgcggggggcgggcgagcgcgcggtgccggccgccccggggctcggcgcgggagccagagcgggagccggcgcggagcgggacgccgggtcccgagcggcccgcggccggggctcgcccccgcccctccctcctctccggcggcggcggcggcggcggcgggcggagtgagctgcggagcctggaatatggtcggggaaatggaaacgaaggagaagccgaagcccaccccagattacctgatgcagctgatgaacgacaagaagctcatgagcagcctgcccaacttctgcgggatcttcaaccacctcgagcggctgctggacgaagaaattagcagagtacggaaagacatgtacaatgacacattaaatggcagtacagagaaaaggagtgcagaattgcctgatgctgtgggacctattgttcagttacaagagaaactttatgtgcctgtaaaagaatacccagattttaattttgttgggagaatccttggacctagaggacttacagccaaacaacttgaagcagaaaccggatgtaaaatcatggtccgaggcaaaggctcaatgagggataaaaaaaaggaggagcaaaatagaggcaagcccaattgggagcatctaaatgaagatttacatgtactaatcactgtggaagatgctcagaacagagcagaaatcaaattgaagagagcagttgaagaagtgaagaaattattggtacctgcagcagaaggagaagacagcctgaagaagatgcagctgatggagcttgcgattctgaatggcacctacagagatgccaacattaaatcaccagcccttgccttttctcttgcagcaacagcccaggctgctccaaggatcattactgggcctgcgccggttctcccaccagctgccctgcgtactcctacgccagctggccctaccataatgcctttgatcagacaaatacagaccgctgtcatgccaaacggaactcctcacccaactgctgcaatagttcctccagggcccgaagctggtttaatctatacaccctatgagtacccctacacattggcaccagctacatcaatccttgagtatcctattgaacctagtggtgtattaggtgcggtggctactaaagttcgaaggcacgatatgcgtgtccatccttaccaaaggattgtgaccgcagaccgagccgccaccggcaactaacctatgaccttctgacctctgaactcttcacccaatgatgacctgaccatgcctgcctgctgatcagttaactggtaatcgcctttgcttgcctgtcgtcagtgcagcgagctgaggcacttgtccgttcgtcttaccatctaaccaaacaaaagacaaagaaattgttgtcctccaactcagctttttttttttttttttcctgtttgggtgaaagtggttctagaaactgcactgaatagtagtaaagcaataaggcccaattcatcccacagcactgatcatcttttaatatcccaccctaagcgaacggtaagaaggcctctcttaagaaggggagacagatggtccttaactactcaatgacagaggcagttactgtgagagacttctaggaatctttttcttctcatagcgaagtcaaagctctctctgaatgtactgtgtgatgatgcatcatgcatgaaccttcggtcagggatatcattggtgaagtgatttcaaaaagtattcaaaatttgatatgctgtttagtcactacagtgccctcaaagggcagaagttgcagccttttttatattgcctgccaaaatttgaagtattagaagaaagtgtgccatgagagaaaaacttaaggagttttgaaaagtaatgcaaataacaaaactgcaacactatttttaaaaagataaatatctgagttaaaattactgaatctttattttacacctaaaaaaatatgagaacaaggtacatgcattatgtgtcacattactgggcaaactgttcaagtatttttttttaaacctccctgtatagaaaaaaatcattaaggatgtaaaagccatgcttgcctatttgctgtatacatgtaatgaaattgtagataaagtgtagtgcattgaaacaaatgaacaaaaagtagatacttttactatacaagggtgctggtgcagaaaaaaatatatatatttttggaaatgtagcattttatactttcaagtgttataaaaaaaaagaaaaagaacaaagaaaccctttatttcattaaatgattttttctggtggttgtcaagaaacaaaagaccaaaagagcctttttgtctttcttttttattttttaagtattggaataagtctaaagaaaagaaagtgccttattttccttcatggtcattcagtcaagtgtctcataaagatcagctcctccctcagaatacaagttaatgcatgttactcagtcgcccagtatgtgaaagaagatatgagggagacaaatgagttgatagtttgaattataggatttttgccacgttaccttgatgcaaatttgccaaatctgatactgtgaaaagatttgataacttttctaatgcctgactagtaagttttaaaacatcattctttaaaagaatagtttaatacttttggttattccaatcttcaatgttaacccaaaggattctgagataaaaattatgtgtcatctaaacttcagtttacagacaaaattagagctttgttttatttggagaagggggatgcattcatttgattttgttttttgtttttaattaattgaatataataggatacctagcaaatgttttcacaaaagtgaatctttgtgattttcattctagaaaacaatgttttaaatcacccaaatttaatcacatgtctttatatcataccagataactggtgtagtgtatccttttactgtttcaataacctctgcctcccccaccccttaactttaaaagaatgtgaaaaactagcatcatagtgcatataaatactcaaccacatttcagcttaagcttctaatttctcaagaagttgaaacagttagttatgtagttgaagcaatttgtgtgcaaagcctacatctaaacacttgagtgaataatcattaactgctcagtaccagacgtggcaaatctcaagtgacagtggacccccccccccgcccagcttatcaactcgtcccctcttccacaccttcccagcatcacagtcagaggtcagcaggaagctgagtcattaccttcttggtgacctcccccaccatcttgtctcacttggaaaccgttgtcagtttatttactatgcaatagacattcattgttttgtatccagctagctttggtttaatatgccactgctttgtctttctgttacacatacagttttgatttatttacaatatatgctgtgccattttgatttttatattgtttggttggttgaataaatttgcgacactcaaacacttgaggtgatagttgttaaaaacaataccagtatttgatccagtttcatctcaactatgttatacctggacattttagatgtttatcaaaggtcttttatggggaagaaagtaaatgtatgaaataataaatgtgtgacatttatagggaatgttggctctgaacaaacttttgaaaacttggttgacaaaattttggatcaactgaaaaaagcatgacttttgaaatctctgaatgccttggttctcagtattatcattctttattgaatttatttcttattaaaatatgtagtttttaagactttttttctgacagtattatgtaattttttagcgtgggtagatgggagtgtcgcttgtatgttatcgtacagctgacatgtatttttgtctattctttattatcttagtttcatgctatgtatgtaccataaccaacctattgcctatgagaaacatgtaagataatgtatttacagccattgttacaagtttataatgtatttttctatcttgttttatatgtatgttatataacattcaaaaagaatttttttcttgattgagaaaaggatacaaaatgcaaaatccacaattttgataactgaaaattgccaattgttttgcagtactttattatattgggtgtcttgtcttttttgggcttttagttagctaatgaatgaatacattagacacttttgggttttagttgggattttacatagcttgcattttaattctttggttctttgctgtttctattaacccacagcattattttaataaatgttataataccaacctactaactctggactttgtctgtttattaacctttatatgtttaattaaaataaacaaataaagacaaaagaatgtaaagtcttgagttactggactaaccctgaagaacgtgaccacagataacatagtgtgacttgtttttatgttgtttgtcagctgacagttttgcacactactgttaaaatggctttggttattctggtcttttagcttgggggccggggcgggtgtgggtgtaggtgcagtagagatgggaacaaagtagcctttgtttgaggcattcttctcttgccacttgcctttcagcatctgcattactaattccacaccttatttttccttctccaaaataatcactgtctgctcacagcatcgagtaaaaagatacattgtcatggtatatacctggagaaaccagtttgattctttgttgaaccatttcttttaatttctgtaaataagtaattttatggtcacattgtaaagcagagaaactgttgatattttacctttatttagatttttgttttaacttgacctttttcctttggaaagcgttgaacttgtttagctaactactcctattaggggagcttaacttgggtaaagtcaaaggcccactggctgtttctcatggtggcctgaagccccgctgctttccagtgaggaaaagaaccctcagcacgttactgagctttcctcaggtatttttttctctgtcacctactttacaaatacagtcagactaaaacattaaacaagaagtttaagggggaataacattgggatttgaaaagttgtatgtgattaatttcttgcatgcaaatcaatttaagatttcttaaatatcttcatgcttttcttggctggaacttgggtaaattaacctgtaattatgaattatttagtttaactcaaggtgcatttttatttcacagattgatacttgcttttttctgtgaaacagttctcctagataccaaaatcctcaggatgaatttttgcatttgtaaataacaatttatctttgtaaattacattttatttatttagagttctaaaattgagggctgaaatgaatgacatgtaatagaagacaaaactgtaccaatacgctgttaaccaatcagactgtccaggtattctcatttcataaatatgtatacacacatataaatacacagagtagtgttagctgatgtgagtgataacagcgaatcaccattgagatggtcatttggatcatgtaaacaaaccgtgtcatgtctctgatgggagcggtgggtagtgtactgttaggtggacaggtcttttaacatgctactatttgtaaaagtttccgttgccataacagttcatgtagtagtctgtgaaaattcgaagctgtctgtcaagctgctaatatacaagttgtcatggtaccatgtaacttaaattgatgaatttctatgcaatttactattctctgaagcctatgaatgcagcctcatctcattttcagttaagggtactttatgtataattatgtcattgctgccttttatgtaggaaatgtaaaaaagttttaaaaggcgaaaataacattacagatttcatttttatacaggttacaatattaaacatgaaactaccaaattccaagaatagtaaaattctagagtcagttgattgattgaaactatttgacaaaacagttgaaagctgagctttcagtcaagaagttggtgaaattaatgtccttaaacttttcctttaggcaaaatgtcagggaaaacttaacatgaaagtagttactcccatacgcaccagtgcagtagctccaggtgtaagaggtcacgaaggcaccctgcccataaaaccaggatgtgcatacgtacacacaatcggtgtctggttatggttttctaaacactacataaggatctgaattttttagtgtgccaaaagcaaacgataggtttaaatgaaattgctcactaccaaatcaagactcttcatatatatacgtgtgtgtatatatatatgtcataacactttcacgtgtgacagcctaaggtttctttagttttaggatggggtggggtgggagtggttttgcatgtttgaccaggatgtgatgcctgtctttattccttgataagaagtagctgttacagcatttcaagcaaattattttaggtagaatagaacttactgccaaatgattatttatttagcaaaaattattctccaacttttcgaattcacaatttttctaagtgcatagagtagttttttacattgtcacgaattccttaatacctttatttaaaatggaaaaaatatggacaatattttagaaatatgtgctacacatctaattttatctgtagtttaagtgatctaaattgagatgcctttgatatgaagagatttaccaacattatatgcactcgtgccttcaatgtggaatcaaactggttaacctcagcacagtcctctcgtttctgtgtttctgctgcactaattgccagggggtgggggagaaggcgaatgaattaattcatagtagaaggaggcgataggtgcagcaaagggcagccacagtgttgattccacattataatgttgttgcctcttcttggcaaaagacaccacattgtgggaagatctcagcttccagggtaaaagttaatttataacttaaaagtgctattaagtttttattaccaaatatatcttttatggtttatattgtagtggtatgtatgaaacatttaaaattttactgtggaaattgtgtatatatatatatatagtcgaaataggtgttcacaggtcacatgtgaacggagaactgcatgaccgtacatgaaatgcaataaaccaactggaaaaagtgcatgtgcttcatcctctcaagccaactgcagctggaaagtgctgcttatcctccacccccagaaaatgcatgtatcaatatgagaataaagaacgcacactttcaattttattgaggctttcaacactatttaaaagaaaatgtaagaatttgacattctggagttattataacattagaaaatgagcataacattcactctgattttagccattaagggagattagtaaacagactgctacagtgttccatagttggactgtgcatccaaaacatttttttatctttaataaatggtacagtttttatgtagttttcgaatgtaagaagaaaggaatgctgaccaaaacttgatttcatcagcttcatgaaaaggactagtgtcattaacctgttgaacagaattggtttattaaaaaaatcatttccagtagtgtgaaacctttacgagtctttaacatctaaatgttatgactccttgtaccttaagttttccagtctttcttatttatatcatctccaagtacctctggctcctttcctcttgctcaccggaaccttagttttcctcaacagaatgctttgttaaagtagcccacagttgcaggatccatagcaccgtcgtgcagactagcagcccaaaggtgtgtttggtttggcttatacggtgttttgctttttaaactacttgccataatttaaaagtggcaacactagacttaaaaaaaaaaaagtctgattgcccatattagattttttttttaattcttcacaaaatctgctcttcctgaaagatcaaagtgtctagaaagcccaaacatgtattcttaacatagtaggcaccagctgaaactgagtaattaaacggtcccctgaagccaagtattccctggttagtcgccaccccaccactccttcctgtctctagtgtcacacttgggctgttgattttcttactcttctcttgctttaatccttccccccggctctctggctcctgtggatatctgtgcttgtttcctggtccaggatggtgatctgactttcaaaccagcttctcaaaaggggtgacataaaatcagttttgatgtttttcctcctgaaaaatcagatgaatattttagtcactgttactcatgcacattgtgttcttatgtttacagaagtgcttaagtgaatggaagcactagacatttggatttccttcctaacgtaatttttaatgattaccccttttatacagtaatttgtggtctttagaaagcagttaaactaattgaccatctaatagttgtactatacatatgtctaaaataatagtcatggtaagtttggcatcatatcttccccaaaaaatgtttattaaaattagattattccagtttaatgctattttgtgaactgtataccctctgaaagcgcttatttttacatgctacacaacagttccaattttaaggagtgtctcctaaaattgggatgaaaatctactgtagtctgttttaaagtatgctatactatgttcattggttacttaactggatattaatataaaggttattacaagaaaaatgatgaagagcaaaaggagaagaaaatatttgcaagtgaatccacaattcttgcagaactatttgagttgatactaaagattttatgttcactcctttaccttagaactgtcaagcttgggaatgaggaaagtgccttggctgtgcttgaaacctgaattttagtgcttcccttattacattcattgttttcaatgattgatttataaaattaagacatactggtagtacaagttgaaagttggtttgaatacattttaattaaatgataatatgttaatatgcttttgttcattgctttctcactgaggtaaaacagcattaaaaagttgtccagaatttaaactga

SEQ ID NO: 4307 - DNA, 6964 bp, Homo sapiens
  source 1..6964: mol_type = genomic DNA
tgaactgaggcgaactccgccgccaagtgagtgaggaggaggaggaggagaaggaggaggaggaagaggaggagcgcagtcggagcgcggcggcagcggcagaggcgccgcggcggggaccagcccagagagaccccccgagcccgcggcacaggcggcggcggcgctgagcgggctcgaccagccgagcgagcggcggccccggctcctcctcgtccggcgccagcagcccgcgccccgcgcccgcactcggccagccgagacccgcctcccgcccgcccgccggcctcgtgagggacgcgccgagccgggcggccgagagcggcggcggctgggagcgcgtcgggcccgggcggaaagtgcctgcggggggcgggcgagcgcgcggtgccggccgccccggggctcggcgcgggagccagagcgggagccggcgcggagcgggacgccgggtcccgagcggcccgcggccggggctcgcccccgcccctccctcctctccggcggcggcggcggcggcggcgggcggagtgagctgcggagcctggaatatggtcggggaaatggaaacgaaggagaagccgaagcccaccccagattacctgatgcagctgatgaacgacaagaagctcatgagcagcctgcccaacttctgcgggatcttcaaccacctcgagcggctgctggacgaagaaattagcagagtacggaaagacatgtacaatgacacattaaatggcagtacagagaaaaggagtgcagaattgcctgatgctgtgggacctattgttcagttacaagagaaactttatgtgcctgtaaaagaatacccagattttaattttgttgggagaatccttggacctagaggacttacagccaaacaacttgaagcagaaaccggatgtaaaatcatggtccgaggcaaaggctcaatgagggataaaaaaaaggaggagcaaaatagaggcaagcccaattgggagcatctaaatgaagatttacatgtactaatcactgtggaagatgctcagaacagagcagaaatcaaattgaagagagcagttgaagaagtgaagaaattattggtacctgcagcagaaggagaagacagcctgaagaagatgcagctgatggagcttgcgattctgaatggcacctacagagatgccaacattaaatcaccagcccttgccttttctcttgcagcaacagcccaggctgctccaaggatcattactgggcctgcgccggttctcccaccagctgccctgcgtactcctacgccagctggccctaccataatgcctttgatcagacaaatacagaccgctgtcatgccaaacggaactcctcacccaactgctgcaatagttcctccagggcccgaagctggtttaatctatacaccctatgagtacccctacacattggcaccagctacatcaatccttgagtatcctattgaacctagtggtgtattagagtggattgaaatgccagtcatgcctgatatttcagcccattgacttgctggatgaaggactagaatacagcagctgttataacacgaccagtcaatgtggaacaaactgtttctgtgcaacccctttgttttaccagacaaaatttgaatactttttttcctgaattgtatatgaccttggtgctgcatgcatgctgttgacttttaggactttgatcttttaaggttttttttccccagcattaatattgatttataaagatttgaaaatctttaatgaactggagaacactaagatttaaactcgaaaattcgttgttcaagtaaagaaagccatgatgctctgtatgttatctgtgtgtgtgcatgcactcaggtgccctttgtttcatgaacaaatacatttcattgtacatgttttctgtttaaatcattgtataaagtaattgcaggtcagaattataccacagaactgtttatgagaggcttgtgtctgttgcacatttcttgaagcatttttaaaataacatgtaacctgtaaccttgttgtttaagttttcttttctattaatactctgtcctgtggtcccgtgcatgctccttttcccagaactcctctctgctgcacccacagcatctgttcccgaggagttatgactcttgacttcctgcagggctggggctcttagccaccagctgctgttccagcactttcagcgcaagatctccctgattttgccacgtggaattgtacttgtatatgattaccttatctaaaatgaataagaggtgatggaccagtttactgcttagaaatagcaagaggcactgcagtaaaacttgtttctcattgtaaagcttcatgtcttttgtttgttggaaaatttttacttatagaaacttaattattagactggtaaaataaagaccaaaatatgcagatttctaattggcattcataaggtgaataataataagtgcccaatgaaaaaatctattatggttaatttcatttcttgctttgccacctaagcagtaaaacatgatattgaccacttggagaactcagaaaattattttaaatttctaagttataataaatttgcacacagataacatgcatgctatttatgtcacatctcacattaaattattttaaaataagcagtgcccttcaaaacagatgcagacatgtgtgttggtagtagtgaggagattggtattagcatcaagtcttcattgatgactaatttttaattcccttccttttatctttaggtatggctttcccaacgaaaggctaagaattcaagaacggtcttaactgaaccctcatcagatctgaatttaacaaatgcttagtctcagcagcctccgggggaaaaaagcttagcctagcagtcagtgacttacttgcactttttgcacatagatataaagtaaaattatgttattaatttggtttagtctgtaatattacacagtaatggtaatttataaaggagtgtatagtagtatactgactgctaagtgtactatactgtttgctttactaatcacctaattcattgcagttcatacttattgactcagagtttaaaaccacaatctgtaggctttaagaattgcttttaaacctttttaagtgataaactcttgaagtggtcttaaggttagcaaataattgtctgtattaaacatggcgttatttaagtagtcctgctgcaagaaaggcacttcagtgaatatgtgactagtaaagcttaaatatgtttggatctaatagagctcatgaaatactgtaacttggggattgtaaatgaatggatacaataggttaaggcccaagatgtttgaaatgaatgcaatattaatagatgcatatatacatgacatattgtggttaattttaaaactactgtgccttaacgtgtttcttaaacttttgtagtaaatgaacatttgaaatccattttgataaacctgctgttaatgttttttccccccttgtgaatgttttctaactttgtcttggtaattgcaatttaactaggtgcggtggctactaaagttcgaaggcacgatatgcgtgtccatccttaccaaaggattgtgaccgcagaccgaggttagtttagttctgcagttcttgtctataagaaatgcgttgggtgtccataaaatttgcaacaccacacctgatggaaaaatgtaattgcttacctgcacacagttttttttccttttctaaatttgtttgtgatcattgacagatttaagggttgggttttttgttttggtttggttttttctcccttcatattttaacttattaaatcttctattattatgtactatgatttattcctactaaaacataaattagtcaatttggggagctattaaattttgatgttgcctcagttattttcattaataacttttgctaaaatttaccttttaaaagttctgaaatttggggttggtattgcaaaatgaattgaacggatggtgctttaatgagagaagtaaaggaatatatgcctcctgtgtacttttggagaaaactgaagatttagtttccatttttctttataataaaatatttgagccactgtataaacatgagggtgcacatgtcaagtacttagctaaaatcaacaaagtgaggactgtgaagataactttcatgtagttggatttttttatataaattagagcgtcaattcccttttattcttacattctcttgccaaaatggatcctttgatttttgtcatttgctgctaaaatatattatctgaaggtaaactgtctcttgaagttctgtggtggtatgagatccagctgtgtgaatataatttttgactaacctgtgactggaaaataagtcttcatttttctcctttacaacttttataatttgtgtcctgtatatgcccttggacccttttataaattatttttgcttattgaggaatggtattttcggtttattgacattgaattgttttctaagtttttccatcacaagataggaatatcaagcatggtagtaaaaaaggattttttacaagtttctattatggcacatttgtttcctacaaattaaattgatcaaagtctcaaatattagtggaggaaaaagtgctggatttgtacttcaattgtacatcttctatgaatttatgaaggacctacctgctttatgtgattaccttgagtactgatgataaatactagacacagctgttgtccacatcagaaataacatgcctttcccaaagacattgttaatatttgtttagcataatccataaagaacgttgaagacttttaaactaatgtattcatcactaacagtgattgttcagtgaacaaaatagaccccagctccgtggtcgtctatgaggatggtattccttgtaagtgttctgtatgagcacgtctcatagggatggggaagttttttggaaagtcacttgagttttaaagaaactggacaattccatgaataatttgaggttttattcatattgctaatgtctacaattgttctaaagagtattttaaagtagtttttttcccccagctaatctttccctatgtatgcccccttttaggagatttctcaccattttgctttaacacaataattattggcctacttaatactccagtgccttgagatagttggacatattttaggaagattttattgtatttggaaaattacgacacattccatgcatggatcttttgtagttacgtgttttgattagtcctgtcactgtttttatttaaaatgcagtgtcagcaaaccgaaatgctcatttcttttttagtaacagagtactcgtatacttatcactgtatgcactcattgggtctaagggagatgtctgaagtccttcacttaaattattttatgatactactgttttctctatttttgaggttaaaattattttaaaaaaatattttgaagagaagtttattagtataagcattcatttaatgcaaaaaaactcagcccttggacatataaccatgtaattctatatgaacgtttagagtactacatggttgaccaatatctagttctttactaaaagtaaactcacctctttatatatatttcaaaactgaatttgaagcctattagagaccaactgaccttttagttgtaatgaactgtatggtcttgcatggtgacacacctgtgtaggaggccaagacttggcagaggatgtagtctaggtgtcctggtatatataaatggtcactcacttcgtttatatattccacactcagaaaagaagtcagagttttttctgagtaatacaaaaaccatcacttacataatttgtataagaaactttaaacagttttaatcaaaactatgagtaacatcaaaaatgctttaagattctatattttggaatacctgtgaagtagtatgactacatcatgttaaatatttattttcttctatgattttggagcagcaatttttattttaaataaaattccacttttaagaaattcagggaagatttggtcacattgaagatacagtatttttgtagtatttataaactgttctaaatgatagactatagaaaacatttttgtcatatgaaggtaaatcagtccattattttggatcatttaaactgaacattacaccttctgggctttgatttatgaagtggcacagaatctaactttgcactgaatatcttttcattcacatctcctctgccttagtcacaatggcaacagtacagaaaattctatcaaacctcagaatatagtagaaataattaagctgttgaatgagtcttaaaaattatactactgttaagtggaccaagtttggtgaagcagaatgtgacaaaggttgattaaggaaggaacaactcaaggacattgggaatgataacttttccacttgagaactactttatgttttactgtaatttttaaagtttttttgtcctttttgttattttgcaaaagaaaatagtatttacaggtggcttcttttaaaatataaaaatataaagcaggaatgtatatgaaatgtcagattttattgtatttgcagagtattagctttgaaattgaataaagaaagctgtttgtagttttaaaatgccttattggtatcaattagaaatttcttctattttttgatgtacttagagctttttgagtgtagaattttaaatggcaggattttacagtgtttacatgcaagtgcattttataagtgttctatatgtgtaaaatagtattttcaactggaaagtgttggctagtgcaaaaggcctggccattttctggttcccatgatgttgcctacactgctagactacagtttagtatcgctttgtatcatgaggccaagaaattccatgttgtttgtaaatagaataattgaaaaagcaataaacatttattgaacaaaagaaa

SEQ ID NO: 4308 - DNA, 7911 bp, Homo sapiens
  source 1..7911: mol_type = genomic DNA
tgaactgaggcgaactccgccgccaagtgagtgaggaggaggaggaggagaaggaggaggaggaagaggaggagcgcagtcggagcgcggcggcagcggcagaggcgccgcggcggggaccagcccagagagaccccccgagcccgcggcacaggcggcggcggcgctgagcgggctcgaccagccgagcgagcggcggccccggctcctcctcgtccggcgccagcagcccgcgccccgcgcccgcactcggccagccgagacccgcctcccgcccgcccgccggcctcgtgagggacgcgccgagccgggcggccgagagcggcggcggctgggagcgcgtcgggcccgggcggaaagtgcctgcggggggcgggcgagcgcgcggtgccggccgccccggggctcggcgcgggagccagagcgggagccggcgcggagcgggacgccgggtcccgagcggcccgcggccggggctcgcccccgcccctccctcctctccggcggcggcggcggcggcggcgggcggagtgagctgcggagcctggaatatggtcggggaaatggaaacgaaggagaagccgaagcccaccccagattacctgatgcagctgatgaacgacaagaagctcatgagcagcctgcccaacttctgcgggatcttcaaccacctcgagcggctgctggacgaagaaattagcagagtacggaaagacatgtacaatgacacattaaatggcagtacagagaaaaggagtgcagaattgcctgatgctgtgggacctattgttcagttacaagagaaactttatgtgcctgtaaaagaatacccagattttaattttgttgggagaatccttggacctagaggacttacagccaaacaacttgaagcagaaaccggatgtaaaatcatggtccgaggcaaaggctcaatgagggataaaaaaaaggaggagcaaaatagaggcaagcccaattgggagcatctaaatgaagatttacatgtactaatcactgtggaagatgctcagaacagagcagaaatcaaattgaagagagcagttgaagaagtgaagaaattattggtacctgcagcagaaggagaagacagcctgaagaagatgcagctgatggagcttgcgattctgaatggcacctacagagatgccaacattaaatcaccagcccttgccttttctcttgcagcaacagcccaggctgctccaaggatcattactgggcctgcgccggttctcccaccagctgccctgcgtactcctacgccagctggccctaccataatgcctttgatcagacaaatacagaccgctgtcatgccaaacggaactcctcacccaactgctgcaatagttcctccagggcccgaagctggtttaatctatacaccctatgagtacccctacacattggcaccagctacatcaatccttgagtatcctattgaacctagtggtgtattaggtaagttcttctccccatggggttaacaacattctctttataaatatttttgctccctcagattttgaaatgattttatcagttttagagaggcaagacaagtttgcattagggaagaccgaaaactaaattttgttttatttcagcctctcataagggttcccctttgaaataattgcaccttaaatttattcagatccactttggtaactgaggttcagtttggttgggtaaatctgttgtgtacatttcaacaaatacttttacatttgacattactgaggtcattctgagttttaggtcccaccccattggcccgtcacctccatcagctccacttctcaaactttatttgagatttattttatctcacaggtttgtgtaattgttggaaaatttttaaacttctaagtgaaagtagtctgagcgctttataaaattcatattattgtgtgtgttttgtaatatttgcgatcacttaaaatatcagataaatacagtcatgcatcgcttaacaacggggatacagtctaagaattgccttgtctggcagtttcatcatttggtgtacatcatagagtgtacttacacagacatagatgatatcgtttactacacacctaggctgtgtggtatagccattataatcttatgggaccacatagtataagtggtccgttgttgaccaaaatgttgttatgcaggcatgactgtagttgtattcttaagatttttcagttcttgtgttttggagtcctagtcatattaaacatgagagatactcttaatttcagtagtacagtatggaatagttaaataaatagcaaatcactgaattcagaatctcacttaaggcagaaattaaaatcataatataaacgcttggttttacatgaacaaaaagtggtgtgctcgaaaaagacattactgatgccttttttttatagagtggattgaaatgccagtcatgcctgatatttcagcccattgacttgctggatgaaggactagaatacagcagctgttataacacgaccagtcaatgtggaacaaactgtttctgtgcaacccctttgttttaccagacaaaatttgaatactttttttcctgaattgtatatgaccttggtgctgcatgcatgctgttgacttttaggactttgatcttttaaggttttttttccccagcattaatattgatttataaagatttgaaaatctttaatgaactggagaacactaagatttaaactcgaaaattcgttgttcaagtaaagaaagccatgatgctctgtatgttatctgtgtgtgtgcatgcactcaggtgccctttgtttcatgaacaaatacatttcattgtacatgttttctgtttaaatcattgtataaagtaattgcaggtcagaattataccacagaactgtttatgagaggcttgtgtctgttgcacatttcttgaagcatttttaaaataacatgtaacctgtaaccttgttgtttaagttttcttttctattaatactctgtcctgtggtcccgtgcatgctccttttcccagaactcctctctgctgcacccacagcatctgttcccgaggagttatgactcttgacttcctgcagggctggggctcttagccaccagctgctgttccagcactttcagcgcaagatctccctgattttgccacgtggaattgtacttgtatatgattaccttatctaaaatgaataagaggtgatggaccagtttactgcttagaaatagcaagaggcactgcagtaaaacttgtttctcattgtaaagcttcatgtcttttgtttgttggaaaatttttacttatagaaacttaattattagactggtaaaataaagaccaaaatatgcagatttctaattggcattcataaggtgaataataataagtgcccaatgaaaaaatctattatggttaatttcatttcttgctttgccacctaagcagtaaaacatgatattgaccacttggagaactcagaaaattattttaaatttctaagttataataaatttgcacacagataacatgcatgctatttatgtcacatctcacattaaattattttaaaataagcagtgcccttcaaaacagatgcagacatgtgtgttggtagtagtgaggagattggtattagcatcaagtcttcattgatgactaatttttaattcccttccttttatctttaggtatggctttcccaacgaaaggctaagaattcaagaacggtcttaactgaaccctcatcagatctgaatttaacaaatgcttagtctcagcagcctccgggggaaaaaagcttagcctagcagtcagtgacttacttgcactttttgcacatagatataaagtaaaattatgttattaatttggtttagtctgtaatattacacagtaatggtaatttataaaggagtgtatagtagtatactgactgctaagtgtactatactgtttgctttactaatcacctaattcattgcagttcatacttattgactcagagtttaaaaccacaatctgtaggctttaagaattgcttttaaacctttttaagtgataaactcttgaagtggtcttaaggttagcaaataattgtctgtattaaacatggcgttatttaagtagtcctgctgcaagaaaggcacttcagtgaatatgtgactagtaaagcttaaatatgtttggatctaatagagctcatgaaatactgtaacttggggattgtaaatgaatggatacaataggttaaggcccaagatgtttgaaatgaatgcaatattaatagatgcatatatacatgacatattgtggttaattttaaaactactgtgccttaacgtgtttcttaaacttttgtagtaaatgaacatttgaaatccattttgataaacctgctgttaatgttttttccccccttgtgaatgttttctaactttgtcttggtaattgcaatttaactaggtgcggtggctactaaagttcgaaggcacgatatgcgtgtccatccttaccaaaggattgtgaccgcagaccgaggttagtttagttctgcagttcttgtctataagaaatgcgttgggtgtccataaaatttgcaacaccacacctgatggaaaaatgtaattgcttacctgcacacagttttttttccttttctaaatttgtttgtgatcattgacagatttaagggttgggttttttgttttggtttggttttttctcccttcatattttaacttattaaatcttctattattatgtactatgatttattcctactaaaacataaattagtcaatttggggagctattaaattttgatgttgcctcagttattttcattaataacttttgctaaaatttaccttttaaaagttctgaaatttggggttggtattgcaaaatgaattgaacggatggtgctttaatgagagaagtaaaggaatatatgcctcctgtgtacttttggagaaaactgaagatttagtttccatttttctttataataaaatatttgagccactgtataaacatgagggtgcacatgtcaagtacttagctaaaatcaacaaagtgaggactgtgaagataactttcatgtagttggatttttttatataaattagagcgtcaattcccttttattcttacattctcttgccaaaatggatcctttgatttttgtcatttgctgctaaaatatattatctgaaggtaaactgtctcttgaagttctgtggtggtatgagatccagctgtgtgaatataatttttgactaacctgtgactggaaaataagtcttcatttttctcctttacaacttttataatttgtgtcctgtatatgcccttggacccttttataaattatttttgcttattgaggaatggtattttcggtttattgacattgaattgttttctaagtttttccatcacaagataggaatatcaagcatggtagtaaaaaaggattttttacaagtttctattatggcacatttgtttcctacaaattaaattgatcaaagtctcaaatattagtggaggaaaaagtgctggatttgtacttcaattgtacatcttctatgaatttatgaaggacctacctgctttatgtgattaccttgagtactgatgataaatactagacacagctgttgtccacatcagaaataacatgcctttcccaaagacattgttaatatttgtttagcataatccataaagaacgttgaagacttttaaactaatgtattcatcactaacagtgattgttcagtgaacaaaatagaccccagctccgtggtcgtctatgaggatggtattccttgtaagtgttctgtatgagcacgtctcatagggatggggaagttttttggaaagtcacttgagttttaaagaaactggacaattccatgaataatttgaggttttattcatattgctaatgtctacaattgttctaaagagtattttaaagtagtttttttcccccagctaatctttccctatgtatgcccccttttaggagatttctcaccattttgctttaacacaataattattggcctacttaatactccagtgccttgagatagttggacatattttaggaagattttattgtatttggaaaattacgacacattccatgcatggatcttttgtagttacgtgttttgattagtcctgtcactgtttttatttaaaatgcagtgtcagcaaaccgaaatgctcatttcttttttagtaacagagtactcgtatacttatcactgtatgcactcattgggtctaagggagatgtctgaagtccttcacttaaattattttatgatactactgttttctctatttttgaggttaaaattattttaaaaaaatattttgaagagaagtttattagtataagcattcatttaatgcaaaaaaactcagcccttggacatataaccatgtaattctatatgaacgtttagagtactacatggttgaccaatatctagttctttactaaaagtaaactcacctctttatatatatttcaaaactgaatttgaagcctattagagaccaactgaccttttagttgtaatgaactgtatggtcttgcatggtgacacacctgtgtaggaggccaagacttggcagaggatgtagtctaggtgtcctggtatatataaatggtcactcacttcgtttatatattccacactcagaaaagaagtcagagttttttctgagtaatacaaaaaccatcacttacataatttgtataagaaactttaaacagttttaatcaaaactatgagtaacatcaaaaatgctttaagattctatattttggaatacctgtgaagtagtatgactacatcatgttaaatatttattttcttctatgattttggagcagcaatttttattttaaataaaattccacttttaagaaattcagggaagatttggtcacattgaagatacagtatttttgtagtatttataaactgttctaaatgatagactatagaaaacatttttgtcatatgaaggtaaatcagtccattattttggatcatttaaactgaacattacaccttctgggctttgatttatgaagtggcacagaatctaactttgcactgaatatcttttcattcacatctcctctgccttagtcacaatggcaacagtacagaaaattctatcaaacctcagaatatagtagaaataattaagctgttgaatgagtcttaaaaattatactactgttaagtggaccaagtttggtgaagcagaatgtgacaaaggttgattaaggaaggaacaactcaaggacattgggaatgataacttttccacttgagaactactttatgttttactgtaatttttaaagtttttttgtcctttttgttattttgcaaaagaaaatagtatttacaggtggcttcttttaaaatataaaaatataaagcaggaatgtatatgaaatgtcagattttattgtatttgcagagtattagctttgaaattgaataaagaaagctgtttgtagttttaaaatgccttattggtatcaattagaaatttcttctattttttgatgtacttagagctttttgagtgtagaattttaaatggcaggattttacagtgtttacatgcaagtgcattttataagtgttctatatgtgtaaaatagtattttcaactggaaagtgttggctagtgcaaaaggcctggccattttctggttcccatgatgttgcctacactgctagactacagtttagtatcgctttgtatcatgaggccaagaaattccatgttgtttgtaaatagaataattgaaaaagcaataaacatttattgaacaaaagaaa

SEQ ID NO: 4309 - DNA, 1063 bp, Homo sapiens
  source 1..1063: mol_type = genomic DNA
ggagtgagctgcggagcctggaatatggtcggggaaatggaaacgaaggagaagccgaagcccaccccagattacctgatgcagctgatgaacgacaagaagctcatgagcagcctgcccaacttctgcgggatcttcaaccacctcgagcggctgctggacgaagaaattagcagagtacggaaagacatgtacaatgacacattaaatggcagtacagagaaaaggagtgcagaattgcctgatgctgtgggacctattgttcagttacaagagaaactttatgtgcctgtaaaagaatacccagattttaattttgttgggagaatccttggacctagaggacttacagccaaacaacttgaagcagaaaccggatgtaaaatcatggtccgaggcaaaggctcaatgagggataaaaaaaaggaggagcaaaatagaggcaagcccaattgggagcatctaaatgaagatttacatgtactaatcactgtggaagatgctcagaacagagcagaaatcaaattgaagagagcagttgaagaagtgaagaaattattggtacctgcagcagaaggagaagacagcctgaagaagatgcagctgatggagcttgcgattctgaatggcacctacagagatgccaacattaaatcaccaacagcccaggctgctccaaggatcattactgggcctgcgccggttctcccaccagctgccctgcgtactcctacgccagctggccctaccataatgcctttgatcagacaaatacagaccgctgtcatgccaaacggaactcctcacccaactgctgcaatagttcctccagggcccgaagctggtttaatctatacaccctatgagtacccctacacattggcaccagctacatcaatccttgagtatcctattgaacctagtggtgtattaggtgcggtggctactaaagttcgaaggcacgatatgcgtgtccatccttaccaaaggattgtgaccgcagaccgagccgccaccggcaactaacctatgaccttctgacctctgaactcttcacccaatg

SEQ ID NO: 4310 - DNA, 5685 bp, Homo sapiens
  source 1..5685: mol_type = genomic DNA
tgaactgaggcgaactccgccgccaagtgagtgaggaggaggaggaggagaaggaggaggaggaagaggaggagcgcagtcggagcgcggcggcagcggcagaggcgccgcggcggggaccagcccagagagaccccccgagcccgcggcacaggcggcggcggcgctgagcgggctcgaccagccgagcgagcggcggccccggctcctcctcgtccggcgccagcagcccgcgccccgcgcccgcactcggccagccgagacccgcctcccgcccgcccgccggcctcgtgagggacgcgccgagccgggcggccgagagcggcggcggctgggagcgcgtcgggcccgggcggaaagtgcctgcggggggcgggcgagcgcgcggtgccggccgccccggggctcggcgcgggagccagagcgggagccggcgcggagcgggacgccgggtcccgagcggcccgcggccggggctcgcccccgcccctccctcctctccggcggcggcggcggcggcggcgggcggagtgagctgcggagcctggaatatggtcggggaaatggaaacgaaggagaagccgaagcccaccccagattacctgatgcagctgatgaacgacaagaagctcatgagcagcctgcccaacttctgcgggatcttcaaccacctcgagcggctgctggacgaagaaattagcagagtacggaaagacatgtacaatgacacattaaatggcagtacagagaaaaggagtgcagaattgcctgatgctgtgggacctattgttcagttacaagagaaactttatgtgcctgtaaaagaatacccagattttaattttgttgggagaatccttggacctagaggacttacagccaaacaacttgaagcagaaaccggatgtaaaatcatggtccgaggcaaaggctcaatgagggataaaaaaaaggaggagcaaaatagaggcaagcccaattgggagcatctaaatgaagatttacatgtactaatcactgtggaagatgctcagaacagagcagaaatcaaattgaagagagcagttgaagaagtgaagaaattattggtacctgcagcagaaggagaagacagcctgaagaagatgcagctgatggagcttgcgattctgaatggcacctacagagatgccaacattaaatcaccagcccttgccttttctcttgcagcaacagcccaggctgctccaaggatcattactgggcctgcgccggttctcccaccagctgccctgcgtactcctacgccagctggccctaccataatgcctttgatcagacaaatacagaccgctgtcatgccaaacggaactcctcacccaactgctgcaatagttcctccagggcccgaagctggtttaatctatacaccctatgagtacccctacacattggcaccagctacatcaatccttgagtatcctattgaacctagtggtgtattaggtatggctttcccaacgaaaggctaagaattcaagaacggtcttaactgaaccctcatcagatctgaatttaacaaatgcttagtctcagcagcctccgggggaaaaaagcttagcctagcagtcagtgacttacttgcactttttgcacatagatataaagtaaaattatgttattaatttggtttagtctgtaatattacacagtaatggtaatttataaaggagtgtatagtagtatactgactgctaagtgtactatactgtttgctttactaatcacctaattcattgcagttcatacttattgactcagagtttaaaaccacaatctgtaggctttaagaattgcttttaaacctttttaagtgataaactcttgaagtggtcttaaggttagcaaataattgtctgtattaaacatggcgttatttaagtagtcctgctgcaagaaaggcacttcagtgaatatgtgactagtaaagcttaaatatgtttggatctaatagagctcatgaaatactgtaacttggggattgtaaatgaatggatacaataggttaaggcccaagatgtttgaaatgaatgcaatattaatagatgcatatatacatgacatattgtggttaattttaaaactactgtgccttaacgtgtttcttaaacttttgtagtaaatgaacatttgaaatccattttgataaacctgctgttaatgttttttccccccttgtgaatgttttctaactttgtcttggtaattgcaatttaactaggtgcggtggctactaaagttcgaaggcacgatatgcgtgtccatccttaccaaaggattgtgaccgcagaccgaggttagtttagttctgcagttcttgtctataagaaatgcgttgggtgtccataaaatttgcaacaccacacctgatggaaaaatgtaattgcttacctgcacacagttttttttccttttctaaatttgtttgtgatcattgacagatttaagggttgggttttttgttttggtttggttttttctcccttcatattttaacttattaaatcttctattattatgtactatgatttattcctactaaaacataaattagtcaatttggggagctattaaattttgatgttgcctcagttattttcattaataacttttgctaaaatttaccttttaaaagttctgaaatttggggttggtattgcaaaatgaattgaacggatggtgctttaatgagagaagtaaaggaatatatgcctcctgtgtacttttggagaaaactgaagatttagtttccatttttctttataataaaatatttgagccactgtataaacatgagggtgcacatgtcaagtacttagctaaaatcaacaaagtgaggactgtgaagataactttcatgtagttggatttttttatataaattagagcgtcaattcccttttattcttacattctcttgccaaaatggatcctttgatttttgtcatttgctgctaaaatatattatctgaaggtaaactgtctcttgaagttctgtggtggtatgagatccagctgtgtgaatataatttttgactaacctgtgactggaaaataagtcttcatttttctcctttacaacttttataatttgtgtcctgtatatgcccttggacccttttataaattatttttgcttattgaggaatggtattttcggtttattgacattgaattgttttctaagtttttccatcacaagataggaatatcaagcatggtagtaaaaaaggattttttacaagtttctattatggcacatttgtttcctacaaattaaattgatcaaagtctcaaatattagtggaggaaaaagtgctggatttgtacttcaattgtacatcttctatgaatttatgaaggacctacctgctttatgtgattaccttgagtactgatgataaatactagacacagctgttgtccacatcagaaataacatgcctttcccaaagacattgttaatatttgtttagcataatccataaagaacgttgaagacttttaaactaatgtattcatcactaacagtgattgttcagtgaacaaaatagaccccagctccgtggtcgtctatgaggatggtattccttgtaagtgttctgtatgagcacgtctcatagggatggggaagttttttggaaagtcacttgagttttaaagaaactggacaattccatgaataatttgaggttttattcatattgctaatgtctacaattgttctaaagagtattttaaagtagtttttttcccccagctaatctttccctatgtatgcccccttttaggagatttctcaccattttgctttaacacaataattattggcctacttaatactccagtgccttgagatagttggacatattttaggaagattttattgtatttggaaaattacgacacattccatgcatggatcttttgtagttacgtgttttgattagtcctgtcactgtttttatttaaaatgcagtgtcagcaaaccgaaatgctcatttcttttttagtaacagagtactcgtatacttatcactgtatgcactcattgggtctaagggagatgtctgaagtccttcacttaaattattttatgatactactgttttctctatttttgaggttaaaattattttaaaaaaatattttgaagagaagtttattagtataagcattcatttaatgcaaaaaaactcagcccttggacatataaccatgtaattctatatgaacgtttagagtactacatggttgaccaatatctagttctttactaaaagtaaactcacctctttatatatatttcaaaactgaatttgaagcctattagagaccaactgaccttttagttgtaatgaactgtatggtcttgcatggtgacacacctgtgtaggaggccaagacttggcagaggatgtagtctaggtgtcctggtatatataaatggtcactcacttcgtttatatattccacactcagaaaagaagtcagagttttttctgagtaatacaaaaaccatcacttacataatttgtataagaaactttaaacagttttaatcaaaactatgagtaacatcaaaaatgctttaagattctatattttggaatacctgtgaagtagtatgactacatcatgttaaatatttattttcttctatgattttggagcagcaatttttattttaaataaaattccacttttaagaaattcagggaagatttggtcacattgaagatacagtatttttgtagtatttataaactgttctaaatgatagactatagaaaacatttttgtcatatgaaggtaaatcagtccattattttggatcatttaaactgaacattacaccttctgggctttgatttatgaagtggcacagaatctaactttgcactgaatatcttttcattcacatctcctctgccttagtcacaatggcaacagtacagaaaattctatcaaacctcagaatatagtagaaataattaagctgttgaatgagtcttaaaaattatactactgttaagtggaccaagtttggtgaagcagaatgtgacaaaggttgattaaggaaggaacaactcaaggacattgggaatgataacttttccacttgagaactactttatgttttactgtaatttttaaagtttttttgtcctttttgttattttgcaaaagaaaatagtatttacaggtggcttcttttaaaatataaaaatataaagcaggaatgtatatgaaatgtcagattttattgtatttgcagagtattagctttgaaattgaataaagaaagctgtttgtagttttaaaatgccttattggtatcaattagaaatttcttctattttttgatgtacttagagctttttgagtgtagaattttaaatggcaggattttacagtgtttacatgcaagtgcattttataagtgttctatatgtgtaaaatagtattttcaactggaaagtgttggctagtgcaaaaggcctggccattttctggttcccatgatgttgcctacactgctagactacagtttagtatcgctttgtatcatgaggccaagaaattccatgttgtttgtaaatagaataattgaaaaagcaataaacatttattgaacaaaagaaa

SEQ ID NO: 4311 - DNA, 595 bp, Homo sapiens
  source 1..595: mol_type = genomic DNA
agatctagggaggagggaacagcagaggcaaaggcagcttgggagggatgggaaatggaaaatcagggaaacaaacaaacaaacaaacaaaatgaatgagtgaatgtgggcttgaatagtaaaacttccagagagaagacgatgggatctctccccaggtaactacctgtagatgaaaaatagatgaaatacacaaggaagtggcaagcaacaactttgagtggaaggtttttctggaaaaaaaaaaatgaagtgcggtttggtttccttgtcaacggaggatgaagtgaacagctgagcagctcgcagagagcaggattaaagcaaggagagccaatcatgactggcaaaacacagaccagcaacgtcaccaataagaatgaccccaagtccatcaactcccgtgttttcatcggcaatctaaatacggcaattgtcaagaaagttgacattgaagccattttttcaaagtatggaaaaatagttggatgttccgttcacaaaggttatgcatttgtacagtacatgagtgagcgacatgcaagagctgcagtggctggagaaaatgccagagtcatcgccggccaaccacttg

SEQ ID NO: 4312 - DNA, 1684 bp, Homo sapiens
  source 1..1684: mol_type = genomic DNA
agtgagcaacagtcttactgcaaagcaggagcacaacccgtctctttgtctccgtggtcaaatcaattacttcttagaaagtctaatttttttcaaaatgaccatgtacaagagcaaacgcagacatcagagatatatcaacatggcaggagagcccaaaccatacagaccaaaacctggaaacaagaggcccctttctgcactttacagacttgaatcaaaggaacctttcctgtctgttggcggttatgtctttgactatgattactacagagatgatttctacaatcggttatttgattaccacgggcgtgtgcctccacctccccgtgcagtaattccgctgaagcgtcccagagtggcagtcacaacgactcgcagggggaaaggagtcttttccatgaaaggtggatcgagatctactgccagtgggtcaacaggttctaaattgaaatcagatgagttacagaccatcaagaaagaattaacccagatcaaaactaaaattgactccttgctagggcgcctggagaagattgagaaacagcagaaggcggaggcagaagctcagaagaagcaattggaagagagtctagtgctgatccaagaggaatgtgtgtcagagattgcagatcactctacagaggagcctgctgaaggagggccagatgccgatggagaagagatgacagatgggatagaggaggacttcgatgaagatgggggtcatgagctgtttctacagataaagtgatctgaaataacgcatgatgccacaaagcagaaaagagaaactgtgacaacccccagaaatgtgaaaggaggtttcttactggacagcagcatctttggttcaatttatataaaaacccaaataaataaaatggacagtattgctcagttttagaaattccatttcttctatgttttaagctgtacaattgtcaggtttttatggtttaaattgtaaatgtgttttcccctttgctaattatgttttttttttcagtcttaaaatgtgaaaggcatttatgaatggtaagggaaacactatatacaaatgtatatttgtaaaagctatttttatgattagcatgtttcactgttgatcatatataaagtcaggtgatattgcaattctgtatttaaagcttatttccaacaatgtcatgtaagaaaagatgcatcttatgctagtttttataatttatttataatttatagtttaaagtacttcagatcataatgataaaatacttgaaaaagttatatttctgccctgtataagcaccctttttattaataaagaatgcagatatttcagatgtgatataatagttaaagaactgttggtttgatctgtgattaagttgagcatgctccgctctactgaactaaatgatccaattattacttcagtctgggtatgagattccatggacaagtaaggactagattgccaaggaaaagactgtcttgcccttggatccaaaagtttaaattagtgcatacatcatgtcatttcacctcctgttcctaggaactctccattcccaagcattgccagtgttttccagataatcttagctgttgtcttgtgctgtggaaatggaagaaaccatcttcacagaccgtaggagaattcaacatataatttcttaataaatactgtttcttttaaaac

SEQ ID NO: 4313 - DNA, 1924 bp, Homo sapiens
  source 1..1924: mol_type = genomic DNA
acagcgaaggcagcctcgccgcgagctgccgctgccgctgctgccgccactggtgttgccgctctcaggcgccaggctccccgtcgccgccgccgccgcctcgccagccagagttgggctccgtgggcttcccccctcgcagcctcggtccttccccgctgcctgcaagtcagcctggctccgagtcacgtgtcagtgcctgaggcagagactgcgagaaaaaaacgcgcttcattccttcttccaccgccatactgtattttatactaaatctcatttttattccaacattttactcccgctcggattaaagcaaggagagccaatcatgactggcaaaacacagaccagcaacgtcaccaataagaatgaccccaagtccatcaactcccgtgttttcatcggcaatctaaatacggcaattgtcaagaaagttgacattgaagccattttttcaaagtatggaaaaatagttggatgttccgttcacaaaggttatgcatttgtacagtacatgagtgagcgacatgcaagagctgcagtggctggagaaaatgccagagtcatcgccggccaaccacttgatatcaacatggcaggagagcccaaaccatacagaccaaaacctggaaacaagaggcccctttctgcactttacagacttgaatcaaaggaacctttcctgtctgttggcggttatgtctttgactatgattactacagagatgatttctacaatcggttatttgattaccacgggcgtgtgcctccacctccccgtgcagtaattccgctgaagcgtcccagagtggcagtcacaacgactcgcagggggaaaggagtcttttccatgaaaggtggatcgagatctactgccagtgggtcaacaggttctaaattgaaatcagatgagttacagaccatcaagaaagaattaacccagatcaaaactaaaattgactccttgctagggcgcctggagaagattgagaaacagcagaaggcggaggcagaagctcagaagaagcaattggaagagagtctagtgctgatccaagaggaatgtgtgtcagagattgcagatcactctacagaggagcctgctgaaggagggccagatgccgatggagaagagatgacagatgggatagaggaggacttcgatgaagatgggggtcatgagctgtttctacagataaagtgatctgaaataacgcatgatgccacaaagcagaaaagagaaactgtgacaacccccagaaatgtgaaaggaggtttcttactggacagcagcatctttggttcaatttatataaaaacccaaataaataaaatggacagtattgctcagttttagaaattccatttcttctatgttttaagctgtacaattgtcaggtttttatggtttaaattgtaaatgtgttttcccctttgctaattatgttttttttttcagtcttaaaatgtgaaaggcatttatgaatggtaagggaaacactatatacaaatgtatatttgtaaaagctatttttatgattagcatgtttcactgttgatcatatataaagtcaggtgatattgcaattctgtatttaaagcttatttccaacaatgtcatgtaagaaaagatgcatcttatgctagtttttataatttatttataatttatagtttaaagtacttcagatcataatgataaaatacttgaaaaagttatatttctgccctgtataagcaccctttttattaataaagaatgcagatatttcagatgtgatataatagttaaagaactgttggtttgatctgtgattaagttgagcatgctccgctctactgaactaaatgatccaattattacttcagtctgggtatgagattccatggacaagtaaggactagattgccaaggaaaagactg

SEQ ID NO: 4314 - DNA, 2701 bp, Homo sapiens
  source 1..2701: mol_type = genomic DNA
cgccaggctccccgtcgccgccgccgccgcctcgccagccagagttgggctccgtgggcttcccccctcgcagcctcggtccttccccgctgcctgcaagtcagcctggctccgagtcacgtgtcagtgcctgaggcagagactgcgagaaaaaaacgcgcttcattccttcttccaccgccatactgtattttatactaaatctcatttttattccaacattttactcccgctcggtgagtaccttctcagtggcattcttgtcctattcttttttttgtccttttttttggttttttgttttttttgtttttgttttttttctttttttccacttctttgattattgtttatatttgggaaagctggaggagcatggttttgagccttttcctgaatccaagtttttctagcatgcgatcgttctgtagacaaggcgctgtgtctcggagtccgcggcgaccgtgcccgctgggagcgtctcccaagtccagcaaaatgtgcaactggttttatggaaaaagcgatgtgaagtatggtgcctatttttttcctttgtaaaaataaaaagcatgtttctaactctttttttgcatactctttttctgataacatttttgtataggtgggattttacggcagtgtttacaagtttgtggtcttgcaatactggtgcaaaccactgagcaaagacattaattttatattttttgtgccctttttggaagccggtgaaaacaaattcgttttttttccctcctgtttttgatacccattgataacatgaaacttttcttacagctggtgattgggatcatttttaagcaaaatacttttttcctcctttaaattaactatgacttttgcacatttgacttttttaaaaaaccgagataattttatgatagatatcctgatatctatatctatattgtcccttatttctcccccttccctccccgtaaatcaattttcaaatgatggcagtggaaggtttttctggaaaaaaaaaaatgaagtgcggtttggtttccttgtcaacggaggatgaagtgaacagctgagcagctcgcagagagcaggattaaagcaaggagagccaatcatgactggcaaaacacagaccagcaacgtcaccaataagaatgaccccaagtccatcaactcccgtgttttcatcggcaatctaaatacggcaattgtcaagaaagttgacattgaagccattttttcaaagtatggaaaaatagttggatgttccgttcacaaaggttatgcatttgtacagtacatgagtgagcgacatgcaagagctgcagtggctggagaaaatgccagagtcatcgccggccaaccacttgatatcaacatggcaggagagcccaaaccatacagaccaaaacctggaaacaagaggcccctttctgcactttacagacttgaatcaaaggaacctttcctgtctgttggcggttatgtctttgactatgattactacagagatgatttctacaatcggttatttgattaccacgggcgtgtgcctccacctccccgtgcagtaattccgctgaagcgtcccagagtggcagtcacaacgactcgcagggggaaaggagtcttttccatgaaaggtggatcgagatctactgccagtgggtcaacaggttctaaattgaaatcagatgagttacagaccatcaagaaagaattaacccagatcaaaactaaaattgactccttgctagggcgcctggagaagattgagaaacagcagaaggcggaggcagaagctcagaagaagcaattggaagagagtctagtgctgatccaagaggaatgtgtgtcagagattgcagatcactctacagaggagcctgctgaaggagggccagatgccgatggagaagagatgacagatgggatagaggaggacttcgatgaagatgggggtcatgagctgtttctacagataaagtgatctgaaataacgcatgatgccacaaagcagaaaagagaaactgtgacaacccccagaaatgtgaaaggaggtttcttactggacagcagcatctttggttcaatttatataaaaacccaaataaataaaatggacagtattgctcagttttagaaattccatttcttctatgttttaagctgtacaattgtcaggtttttatggtttaaattgtaaatgtgttttcccctttgctaattatgttttttttttcagtcttaaaatgtgaaaggcatttatgaatggtaagggaaacactatatacaaatgtatatttgtaaaagctatttttatgattagcatgtttcactgttgatcatatataaagtcaggtgatattgcaattctgtatttaaagcttatttccaacaatgtcatgtaagaaaagatgcatcttatgctagtttttataatttatttataatttatagtttaaagtacttcagatcataatgataaaatacttgaaaaagttatatttctgccctgtataagcaccctttttattaataaagaatgcagatatttcagatgtgatataatagttaaagaactgttggtttgatctgtgattaagttgagcatgctccgctctactgaactaaatgatccaattattacttcagtctgggtatgagattccatggacaagtaaggactagattgccaaggaaaagactg

SEQ ID NO: 4315 - DNA, 571 bp, Homo sapiens
  source 1..571: mol_type = genomic DNA
aaaaaaccgagataattttatgatagatatcctgatatctatatctatattgtcccttatttctcccccttccctccccgtaaatcaattttcaaatgatggcagtggaaggtttttctggaaaaaaaaaaatgaagtgcggtttggtttccttgtcaacggaggatgaagtgaacagctgagcagctcgcagagagcagatatagcccttggcgaggtgcctggctccatagattaaagcaaggagagccaatcatgactggcaaaacacagaccagcaacgtcaccaataagaatgaccccaagtccatcaactcccgtgttttcatcggcaatctaaatacggcaattgtcaagaaagttgacattgaagccattttttcaaagtatggaaaaatagttggatgttccgttcacaaaggttatgcatttgtacagtacatgagtgagcgacatgcaagagctgcagtggctggagaaaatgccagagtcatcgccggccaaccacttgatatcaacatggcaggagagcccaaaccatacagaccaaaacctggaaacaagaggcccc

SEQ ID NO: 4316 - DNA, 2168 bp, Homo sapiens
  source 1..2168: mol_type = genomic DNA
tgggctcacagcgaaggcagcctcgccgcgagctgccgctgccgctgctgccgccactggtgttgccgctctcaggcgccaggctccccgtcgccgccgccgccgcctcgccagccagagttgggctccgtgggcttcccccctcgcagcctcggtccttccccgctgcctgcaagtcagcctggctccgagtcacgtgtcagtgcctgaggcagagactgcgagaaaaaaacgcgcttcattccttcttccaccgccatactgtattttatactaaatctcatttttattccaacattttactcccgctcgatatagcccttggcgaggtgcctggctccatagattaaagcaaggagagccaatcatgactggcaaaacacagaccagcaacgtcaccaataagaatgaccccaagtccatcaactcccgtgttttcatcggcaatctaaatacggcaattgtcaagaaagttgacattgaagccattttttcaaagtatggaaaaatagttggatgttccgttcacaaaggttatgcatttgtacagtacatgagtgagcgacatgcaagagctgcagtggctggagaaaatgccagagtcatcgccggccaaccacttgatatcaacatggcaggagagcccaaaccatacagaccaaaacctggaaacaagaggcccctttctgcactttacagacttgaatcaaaggaacctttcctgtctgttggcggttatgtctttgactatgattactacagagatgatttctacaatcggttatttgattaccacgggcgtgtgcctccacctccccgtgcagtaattccgctgaagcgtcccagagtggcagtcacaacgactcgcagggggaaaggagtcttttccatgaaaggtggatcgagatctactgccagtgggtcaacaggttctaaattgaaatcagatgagttacagaccatcaagaaagaattaacccagatcaaaactaaaattgactccttgctagggcgcctggagaagattgagaaacagcagaaggcggaggcagaagctcagaagaagcaattggaagagagtctagtgctgatccaagaggaatgtgtgtcagagattgcagatcactctacagaggagcctgctgaaggagggccagatgccgatggagaagagatgacagatgggatagaggaggacttcgatgaagatgggggtcatgagctgtttctacagataaagtgatctgaaataacgcatgatgccacaaagcagaaaagagaaactgtgacaacccccagaaatgtgaaaggaggtttcttactggacagcagcatctttggttcaatttatataaaaacccaaataaataaaatggacagtattgctcagttttagaaattccatttcttctatgttttaagctgtacaattgtcaggtttttatggtttaaattgtaaatgtgttttcccctttgctaattatgttttttttttcagtcttaaaatgtgaaaggcatttatgaatggtaagggaaacactatatacaaatgtatatttgtaaaagctatttttatgattagcatgtttcactgttgatcatatataaagtcaggtgatattgcaattctgtatttaaagcttatttccaacaatgtcatgtaagaaaagatgcatcttatgctagtttttataatttatttataatttatagtttaaagtacttcagatcataatgataaaatacttgaaaaagttatatttctgccctgtataagcaccctttttattaataaagaatgcagatatttcagatgtgatataatagttaaagaactgttggtttgatctgtgattaagttgagcatgctccgctctactgaactaaatgatccaattattacttcagtctgggtatgagattccatggacaagtaaggactagattgccaaggaaaagactgtcttgcccttggatccaaaagtttaaattagtgcatacatcatgtcatttcacctcctgttcctaggaactctccattcccaagcattgccagtgttttccagataatcttagctgttgtcttgtgctgtggaaatggaagaaaccatcttcacagaccgtaggagaattcaacatataatttcttaataaatactgtttctttt

SEQ ID NO: 4317 - DNA, 1405 bp, Homo sapiens
  source 1..1405: mol_type = genomic DNA
atagccgtttctctgttcttcctctttgcgttgctctgcgggcgctacgctggctccaccgccttctctgccgttcaaaccccgcggttgtccttaccctagcgagggtaggggggtcgggtgccatcgtctttccgacggagtggatatttgtccctccttgaaccacatggtacctaaaggagccaccatgttggtgataccccccggactgagcgaggaagaggaggctctgcagaagaaattcaacaagctcaagaaaaagaaaaaggcattgctggctctgaagaagcaaagtagcagcagcacaaccagccaaggtggtgtcaaacgctcactatcagagcagcctgtcatggacacagccacagcaacagagcaggcaaagcagctggtgaagtcaggagccatcagtgccatcaaggctgagaccaagaactcaggcttcaagcgttctcgaacccttgaggggaagttaaaggaccccgagaagggaccagtccccactttccagccgttccagaggagcatatctgctgatgatgacctgcaagagtcatccagacgtccccagaggaaatctctgtatgagagctttgtgtcttctagtgatcgacttcgagaactaggaccagatggagaagaggcagagggcccaggggctggtgatggtccccctcgaagctttgactggggctatgaagaacgcagtggtgcccactcctcagcctcccctccccgaagccgcagccgggaccgcagccatgagaggaaccgggacagagaccgagatcgggagcgggatcgagaccgggatcgagacagagacagagagcgggacagggatcgggatcgggatcgagatcgagaccgggaacgggacagggatcgggagcgggatcgagaccgagaccgagagggtcctttccgcaggtcggattcattccctgaacggcgagcccctaggaaagggaatactctctatgtatatggagaagacatgacacccacccttctccgtggggccttctctccttttggaaacatcattgacctctccatggacccacccagaaactgtgccttcgtcacctatgaaaagatggagtcagcagatcaggccgttgctgagctcaacgggacccaggtggagtctgtacagctcaaagtcaacatagcccgaaaacagcccatgctggatgccgctactggcaagtctgtctggggctccctcgctgtccagaacagccctaagggttgccaccgggacaagaggacccagattgtctacagtgatgacgtctacaaggaaaaccttgtggatggcttctagggaacagagctggattccttgtgcctcatatgccccaatgctggtctcagtaaaacactgaggtggaagctt

SEQ ID NO: 4318 - DNA, 1202 bp, Homo sapiens
  source 1..1202: mol_type = genomic DNA
gagcccgctatcagcggccagcgcgggcgcggccggagaccgtggggcccccggttgccgccccctcgggagccaccatgttggtgataccccccggactgagcgaggaagaggaggctctgcagaagaaattcaacaagctcaagaaaaagaaaaaggcattgctggctctgaagaagcaaagtagcagcagcacaaccagccaaggtggtgtcaaacgctcactatcagagcagcctgtcatggacacagccacagcaacagagcaggcaaagcagctggtgaagtcaggagccatcagtgccatcaaggctgagaccaagaactcaggcttcaagcgttctcgaacccttgaggggaagttaaaggaccccgagaagggaccagtccccactttccagccgttccagaggagcatatctgctgatgatgacctgcaagagtcatccagacgtccccagaggaaatctctgtatgagagctttgactggggctatgaagaacgcagtggtgcccactcctcagcctcccctccccgaagccgcagccgggaccgcagccatgagaggaaccgggacagagaccgagatcgggagcgggatcgagaccgggatcgagacagagacagagagcgggacagggatcgggatcgggatcgagatcgagaccgggaacgggacagggatcgggagcgggatcgagaccgagaccgagagggtcctttccgcaggtcggattcattccctgaacggcgagcccctaggaaagggaatactctctatgtatatggagaagacatgacacccacccttctccgtggggccttctctccttttggaaacatcattgacctctccatggacccacccagaaactgtgccttcgtcacctatgaaaagatggagtcagcagatcaggccgttgctgagctcaacgggacccaggtggagtctgtacagctcaaagtcaacatagcccgaaaacagcccatgctggatgccgctactggcaagtctgtctggggctccctcgctgtccagaacagccctaagggttgccaccgggacaagaggacccagattgtctacagtgatgacgtctacaaggaaaaccttgtggatggcttctagggaacagagctggattccttgtgcctcatatgccccaatgctggtctcagtaaaacactgaggtggaagctt

SEQ ID NO: 4319 - DNA, 1075 bp, Homo sapiens
  source 1..1075: mol_type = genomic DNA
cccgctatcagcggccagcgcgggcgcggccggagaccgtggggcccccggttgccgccccctcgggagccaccatgttggtgataccccccggactgagcgaggaagaggaggctctgcagaagaaattcaacaagctcaagaaaaagaaaaaggcattgctggctctgaagaagcaaagtagcagcagcacaaccagccaaggtggtgtcaaacgctcactatcagagcagcctgtcatggacacagccacagcaacagagcaggcaaagcagctggtgaagtcaggagccatcagtgccatcaaggctgagaccaagaactcaggcttcaagcgttctcgaacccttgaggggaagttaaaggaccccgagaagggaccagtccccactttccagccgttccagaggagcatatctgctgatgatgacctgcaagagtcatccagacgtccccagaggaaatctctgtatgagagtgatcgacttcgagaactaggaccagatggagaagaggcagagggcccaggggctggtgatggtccccctcgaagctttgactggggctatgaagaacgcagtggtgcccactcctcagcctcccctccccgaagccgcagccgggaccgcagccatgagaggaaccgggacagagaccgagatcgggagcgggatcgagaccgggatcgagacagagacagagagcgggacagggatcgggatcgggatcgagatcgagaccgggaacgggacagggatcgggagcgggatcgagaccgagaccgagagggtcctttccgcaggtcggattcattccctgaacggcgagcccctaggaaagggaatactctctatgtatatggagaagacatgacacccacccttctccgtggggccttctctccttttggaaacatcattgacctctccatggacccacccagaaactgtgccttcgtcacctatgaaaagatggagtcagcagatcaggccgttgctgagctcaacgggacccaggtggagtctgtacagctcaaagtcaacatagcccgaaaacagcccatgctggatgccgc

SEQ ID NO: 4320 - DNA, 1584 bp, Homo sapiens
  source 1..1584: mol_type = genomic DNA
aagtagaggcaacttccggtacagccccgccgagagcgtgaactatcgctgcggaggggcagacctggaccggtggaaggccgggcggaagtgcgcgcctggggccgccttggttaccgcgttttccgctcctcgctacgtcatcgttgtgagcccgctatcagcggccagcgcgggcgcggccggagaccgtggggcccccggttgccgccccctcgggagccaccatgttggtgataccccccggactgagcgaggaagaggaggctctgcagaagaaattcaacaagctcaagaaaaagaaaaaggcattgctggctctgaagaagcaaagtagcagcagcacaaccagccaaggtggtgtcaaacgctcactatcagagcagcctgtcatggacacagccacagcaacagagcaggcaaagcagctggtgaagtcaggagccatcagtgccatcaaggctgagaccaagaactcaggcttcaagcgttctcgaacccttgaggggaagttaaaggaccccgagaagggaccagtccccactttccagccgttccagaggagcatatctgctgatgatgacctgcaagagtcatccagacgtccccagaggaaatctctgtatgagagctttgtgtcttctagtgatcgacttcgagaactaggaccagatggagaagaggcagagggcccaggggctggtgatggtccccctcgaagctttgactggggctatgaagaacgcagtggtgcccactcctcagcctcccctccccgaagccgcagccgggaccgcagccatgagaggaaccgggacagagaccgagatcgggagcgggatcgagaccgggatcgagacagagacagagagcgggacagggatcgggatcgggatcgagatcgagaccgggaacgggacagggatcgggagcgggatcgagaccgagaccgagagggtcctttccgcaggtcggattcattccctgaacggcgagcccctaggaaagggaatactctctatgtatatggagaagacatgacacccacccttctccgtggggccttctctccttttggaaacatcattgacctctccatggacccacccagaaactgtgccttcgtcacctatgaaaagatggagtcagcagatcaggccgttgctgagctcaacgggacccaggtggagtctgtacagctcaaagtcaacatagcccgaaaacagcccatgctggatgccgctactggcaagtctgtctggggctccctcgctgtccagaacagccctaagggttgccaccgggacaagaggacccagattgtctacagtgatgacgtctacaaggaaaaccttgtggatggcttctagggaacagagctggattccttgtgcctcatatgccccaatgctggtctcagtaaaacactgaggtggaagcttacacatctccctcagcctctggtttttcagcacttgggattggggttaaacctttaaaaacggctgtcaggtttgatctcagtgtaacaacatggccagtgcctgttccccactcccttgccccaaaaggatctggaacaca

SEQ ID NO: 4321 - DNA, 765 bp, Homo sapiens
  source 1..765: mol_type = genomic DNA
ttttctcatagccgtttctctgttcttcctctttgcgttgctctgcgggcgctacgctggctccaccgccttctctgccgttcaaaccccgcggttgtccttaccctagcgagggtaggggggtcgggtgccatcgtctttccgacggagtggatatttgtccctccttgaaccacatggtacctaaaggtgctggtgtctgtgatccctggagacaggagggaatgctggatgatcccgaccagcgggagcttggacagcagcctggtttaagcaaggggagccaccatgttggtgataccccccggactgagcgaggaagaggaggctctgcagaagaaattcaacaagctcaagaaaaagaaaaaggcattgctggctctgaagaagcaaagtagcagcagcacaaccagccaaggtggtgtcaaacgctcactatcagagcagcctgtcatggacacagccacagcaacagagcaggcaaagcagctggtgaagtcaggagccatcagtgccatcaaggctgagaccaagaactcaggcttcaagcgttctcgaacccttgaggggaagttaaaggaccccgagaagggaccagtccccactttccagccgttccagaggagcatatctgctgatgatgacctgcaagagtcatccagacgtccccagaggaaatctctgtatgagagctttgtgtcttctagtgatcgacttcgagaactaggaccagatggagaagaggcagagggcccaggggctggt

SEQ ID NO: 4322 - DNA, 914 bp, Homo sapiens
  source 1..914: mol_type = genomic DNA
gtcttgggccctgcccctgaactaggagccaccatgttggtgataccccccggactgagcgaggaagaggaggctctgcagaagaaattcaacaagctcaagaaaaagaaaaaggcattgctggctctgaagaagcaaagtagcagcagcacaaccagccaaggtggtgtcaaacgctcactatcagagcagcctgtcatggacacagccacagcaacagagcaggcaaagcagctggtgaagtcaggagccatcagtgccatcaaggctgagaccaagaactcaggcttcaagcgttctcgaacccttgaggggaagttaaaggaccccgagaagggaccagtccccactttccagccgttccagaggagcatatctgctgatgatgacctgcaagagtcatccagacgtccccagaggaaatctctgtatgagagctttgtgtcttctagtgatcgacttcgagaactaggaccagatggagaagaggcagagggcccaggggctggtgatggtccccctcgaagctttgactggggctatgaagaacgcagtggtgcccactcctcagcctcccctccccgaagccgcagccgggaccgcagccatgagaggaaccgggacagagaccgagatcgggagcgggatcgagaccgggatcgagacagagacagagagcgggacagggatcgggatcgggatcgagatcgagaccgggaacgggacagggatcgggagcgggatcgagaccgagaccgagagggtcctttccgcaggtcggattcattccctgaacggcgagcccctaggaaagggaatactctctatgtatatggagaagacatgacacccacccttctccgtggggccttctctccttttggaaacatcattgacctctccatggacccacc

SEQ ID NO: 4323 - DNA, 914 bp, Homo sapiens; identical to SEQ ID NO: 4322
  source 1..914: mol_type = genomic DNA

SEQ ID NO: 4324 - DNA, 847 bp, Homo sapiens
  source 1..847: mol_type = genomic DNA
agccaaagacaagagtaggcagacctgaaggggtggggttgggtacagtgtggacggcgtgtgaaccccgggtggtaacagtggagaaagatgtcttgggccctgcccctgaactaggagccaccatgttggtgataccccccggactgagcgaggaagaggaggctctgcagaagaaattcaacaagctcaagaaaaagaaaaaggcattgctggctctgaagaagcaaagtagcagcagcacaaccagccaaggtggtgtcaaacgctcactatcagagcagcctgtcatggacacagccacagcaacagagcaggcaaagcagctggtgaagtcaggagccatcagtgccatcaaggctgagaccaagaactcaggcttcaagcgttctcgaacccttgaggggaagttaaaggaccccgagaagggaccagtccccactttccagccgttccagaggagcatatctgctgatgatgacctgcaagagtcatccagacgtccccagaggaaatctctgtatgagagtgatcgacttcgagaactaggaccagatggagaagaggcagagggcccaggggctggtgatggtccccctcgaagctttgactggggctatgaagaacgcagtggtgcccactcctcagcctcccctccccgaagccgcagccgggaccgcagccatgagaggaaccgggacagagaccgagatcgggagcgggatcgagaccgggatcgagacagagacagagagcgggacagggatcgggatcgggatcgagatcgagaccgggaacgggacagggatcgggagcgggatcgagaccgagaccgagagggtccttt

SEQ ID NO: 4325 - DNA, 1075 bp, Homo sapiens; identical to SEQ ID NO: 4319
  source 1..1075: mol_type = genomic DNA

SEQ ID NO: 4326 - DNA, 1566 bp, Homo sapiens
  source 1..1566: mol_type = genomic DNA
gtacagccccgccgagagcgtgaactatcgctgcggaggggcagacctggaccggtggaaggccgggcggaagtgcgcgcctggggccgccttggttaccgcgttttccgctcctcgctacgtcatcgttgtgagcccgctatcagcggccagcgcgggcgcggccggagaccgtggggcccccggttgccgccccctcgggagccaccatgttggtgataccccccggactgagcgaggaagaggaggctctgcagaagaaattcaacaagctcaagaaaaagaaaaaggcattgctggctctgaagaagcaaagtagcagcagcacaaccagccaaggtggtgtcaaacgctcactatcagagcagcctgtcatggacacagccacagcaacagagcaggcaaagcagctggtgaagtcaggagccatcagtgccatcaaggctgagaccaagaactcaggcttcaagcgttctcgaacccttgaggggaagttaaaggaccccgagaagggaccagtccccactttccagccgttccagaggagcatatctgctgatgatgacctgcaagagtcatccagacgtccccagaggaaatctctgtatgagagctttgtgtcttctagtgatcgacttcgagaactaggaccagatggagaagaggcagagggcccaggggctggtgatggtccccctcgaagctttgactggggctatgaagaacgcagtggtgcccactcctcagcctcccctccccgaagccgcagccgggaccgcagccatgagaggaaccgggacagagaccgagatcgggagcgggatcgagaccgggatcgagacagagacagagagcgggacagggatcgggatcgggatcgagatcgagaccgggaacgggacagggatcgggagcgggatcgagaccgagaccgagagggtcctttccgcaggtcggattcattccctgaacggcgagcccctaggaaagggaatactctctatgtatatggagaagacatgacacccacccttctccgtggggccttctctccttttggaaacatcattgacctctccatggacccacccagaaactgtgccttcgtcacctatgaaaagatggagtcagcagatcaggccgttgctgagctcaacgggacccaggtggagtctgtacagctcaaagtcaacatagcccgaaaacagcccatgctggatgccgctactggcaagtctgtctggggctccctcgctgtccagaacagccctaagggttgccaccgggacaagaggacccagattgtctacagtgatgacgtctacaaggaaaaccttgtggatggcttctagggaacagagctggattccttgtgcctcatatgccccaatgctggtctcagtaaaacactgaggtggaagcttacacatctccctcagcctctggtttttcagcacttgggattggggttaaacctttaaaaacggctgtcaggtttgatctcagtgtaacaacatggccagtgcctgttccccactcccttgccccaaaaggatctggaacaca

SEQ ID NO: 4327 - DNA, 1405 bp, Homo sapiens; identical to SEQ ID NO: 4317
  source 1..1405: mol_type = genomic DNA

SEQ ID NO: 4328 - DNA, 765 bp, Homo sapiens; identical to SEQ ID NO: 4321
  source 1..765: mol_type = genomic DNA

SEQ ID NO: 4329 - DNA, 1405 bp, Homo sapiens; identical to SEQ ID NO: 4317
  source 1..1405: mol_type = genomic DNA

SEQ ID NO: 4330 - DNA, 914 bp, Homo sapiens; identical to SEQ ID NO: 4322
  source 1..914: mol_type = genomic DNA

SEQ ID NO: 4331 - DNA, 847 bp, Homo sapiens; identical to SEQ ID NO: 4324
  source 1..847: mol_type = genomic DNA

SEQ ID NO: 4332 - DNA, 1566 bp, Homo sapiens; identical to SEQ ID NO: 4326
  source 1..1566: mol_type = genomic DNA

SEQ ID NO: 4333 - DNA, 765 bp, Homo sapiens; identical to SEQ ID NO: 4321
  source 1..765: mol_type = genomic DNA

SEQ ID NO: 4334 - DNA, 1075 bp, Homo sapiens; identical to SEQ ID NO: 4319
  source 1..1075: mol_type = genomic DNA

SEQ ID NO: 4335 - DNA, 1405 bp, Homo sapiens; identical to SEQ ID NO: 4317
  source 1..1405: mol_type = genomic DNA

SEQ ID NO: 4336 - DNA, 1566 bp, Homo sapiens; identical to SEQ ID NO: 4326
  source 1..1566: mol_type = genomic DNA

SEQ ID NO: 4337 - DNA, 1075 bp, Homo sapiens; identical to SEQ ID NO: 4319
  source 1..1075: mol_type = genomic DNA

SEQ ID NO: 4338 - DNA, 847 bp, Homo sapiens; identical to SEQ ID NO: 4324
  source 1..847: mol_type = genomic DNA

SEQ ID NO: 4339 - DNA, 765 bp, Homo sapiens; identical to SEQ ID NO: 4321
  source 1..765: mol_type = genomic DNA

SEQ ID NO: 4340 - DNA, 914 bp, Homo sapiens; identical to SEQ ID NO: 4322
  source 1..914: mol_type = genomic DNA

SEQ ID NO: 4341 - DNA, 1075 bp, Homo sapiens; identical to SEQ ID NO: 4319
  source 1..1075: mol_type = genomic DNA

SEQ ID NO: 4342 - DNA, 1405 bp, Homo sapiens; identical to SEQ ID NO: 4317
  source 1..1405: mol_type = genomic DNA

SEQ ID NO: 4343 - DNA, 1566 bp, Homo sapiens; identical to SEQ ID NO: 4326
  source 1..1566: mol_type = genomic DNA

SEQ ID NO: 4344 - DNA, 914 bp, Homo sapiens; identical to SEQ ID NO: 4322
  source 1..914: mol_type = genomic DNA

SEQ ID NO: 4345 - DNA, 847 bp, Homo sapiens; identical to SEQ ID NO: 4324
  source 1..847: mol_type = genomic DNA

SEQ ID NO: 4346 - DNA, 765 bp, Homo sapiens; identical to SEQ ID NO: 4321
  source 1..765: mol_type = genomic DNA

SEQ ID NO: 4347 - DNA, 914 bp, Homo sapiens; identical to SEQ ID NO: 4322
  source 1..914: mol_type = genomic DNA

SEQ ID NO: 4348 - DNA, 1075 bp, Homo sapiens; identical to SEQ ID NO: 4319
  source 1..1075: mol_type = genomic DNA

SEQ ID NO: 4349 - DNA, 1566 bp, Homo sapiens; identical to SEQ ID NO: 4326
  source 1..1566: mol_type = genomic DNA

SEQ ID NO: 4350 - DNA, 1405 bp, Homo sapiens; identical to SEQ ID NO: 4317
  source 1..1405: mol_type = genomic DNA

SEQ ID NO: 4351 - DNA, 765 bp, Homo sapiens; identical to SEQ ID NO: 4321
  source 1..765: mol_type = genomic DNA

SEQ ID NO: 4352 - DNA, 847 bp, Homo sapiens; identical to SEQ ID NO: 4324
  source 1..847: mol_type = genomic DNA

SEQ ID NO: 4353 - DNA, 2011 bp, Homo sapiens
  source 1..2011: mol_type = genomic DNA
gctgttcgtccgggttttttacgttttaatttccaggacttgaactgccatgtcctctgaagaaggaaagctcttcgtgggagggctcaactttaacaccgacgagcaggcactggaagaccacttcagcagtttcggacctatctctgaggtggtcgttgtcaaggaccgggagactcagcggtccaggggttttggtttcatcaccttcaccaacccagagcatgcttcagttgccatgagagccatgaacggagaggtggggcctcctatctgcagagggaccttgtccccatctgcggcttccttcattctttttgtttttccctctgtgtctgctcggggcagcgtggccaccaagccccgcagtgcccactcacaggagcatgactgccttttgttctagggggtggagggcagcggcagacagagcctggccgcctgggaggcgacgactggtcctgcatgaggccgagaagccacctgtggatggttgacctgccttgggcttaggtagtagagtctgcagacctgtgggcctggcccggagaggacctcgtgagtcttctgacatggactctgaagcctcaaaccaagagaggtgtctgtctagccctgatagtcgggcagcttagaggagtggggaggagaactcagcctgagttcagtcaagatgtaagtagtagcaaggggaacatggtgcattcaggtcattttgtgtgggattctatagctcctgatgaagccattctggggtaaaggagcttattctggaacatggcacccagaacctggtgcccagcaggaatttttggcctcttttgcccacttacccttgcctgctcttccctcaccattgccctgactgactgccaacccatcatccttgtgtctcccacacttagtctctggatggtcgtcagatccgtgtggatcatgcaggcaagtctgctcggggaaccagaggaggtggctttggggcccatgggcgtggtcgcagctactctagaggtggtggggaccagggctatgggagtggcaggtattatgacagtcgacctggagggtatggatatggatatggacgttccagagactataatggcagaaaccagggtggttatgaccgctactcaggaggaaattacagagacaattatgacaactgaaatgagacatgcacataatatagatacacaaggaataatttctgatccaggatcgtccttccaaatggctgtatttataaaggtttttggagctgcaccgaagcatcttattttatagtatatcaaccttttgtttttaaattgacctgccaaggtagctgaagaccttttagacagttccatctttttttttaaattttttctgcctatttaaagacaaattatgggacgtttgtagaacctgagtatttttctttttaccagttttttagtttgagctcttaggtttattggagctagcaataattggttctggcaagtttggccagactgacttcaaaaaattaatgtgtatccagggacattttaaaaacctgtacacagtgtttattgtggttaggaagcaatttcccaatgtacctataagaaatgtgcatcaagccagcctgaccaacatggtgaaaccccatctgtactaaacataaaaaaattagcctggcatggtggtgtacgcctgtaatcccagtgacttgggaggctgaggcaggagaatcgcttgaacccgggaggcggaggttgcagtgagctaagatcgcgccactgtactccagcctgggcaacagcgagactccatctcaaaaaaaaaggaaatgtgtatcaagaacatgattatccagcggtattttctaattcagatcatcaaactgattatatagaagagttggctttaaaatgtttgcaaatgtctttttttttttaatactggaagaaaaaatattctgttgtgtctcatacagtgcttaggatgtctttcacagagcttattaaaaagatgaaacctg

SEQ ID NO: 4354 - DNA, 2162 bp, Homo sapiens
  source 1..2162: mol_type = genomic DNA
gctcctccgagctcgctgttcgtccgggttttttacgttttaatttccaggacttgaactgccatgtcctctgaagaaggaaagctcttcgtgggagggctcaactttaacaccgacgagcaggcactggaagaccacttcagcagtttcggacctatctctgaggtggtcgttgtcaaggaccgggagactcagcggtccaggggttttggtttcatcaccttcaccaacccagagcatgcttcagttgccatgagagccatgaacggagagtctctggatggtcgtcagatccgtgtggatcatgcaggcaagtctgctcggggaaccagaggaggtggctttggggcccatgggcgtggtcgcagctactctagaggtggtggggaccagggctatgggagtggcaggtattatgacagtcgacctggagggtatggatatggatatggacgttccagagactataatggcagaaaccagggtggttatgaccgctactcaggaggaaattacagagacaattatgacaactgaaatgagacatgcacataatatagatacacaaggaataatttctgatccaggatcgtccttccaaatggctgtatttataaaggtttttggagctgcaccgaagcatcttattttatagtatatcaaccttttgtttttaaattgacctgccaaggtagctgaagaccttttagacagttccatctttttttttaaattttttctgcctatttaaagacaaattatgggacgtttgtagaacctgagtatttttctttttaccagttttttagtttgagctcttaggtttattggagctagcaataattggttctggcaagtttggccagactgacttcaaaaaattaatgtgtatccagggacattttaaaaacctgtacacagtgtttattgtggttaggaagcaatttcccaatgtacctataagaaatgtgcatcaagccagcctgaccaacatggtgaaaccccatctgtactaaacataaaaaaattagcctggcatggtggtgtacgcctgtaatcccagtgacttgggaggctgaggcaggagaatcgcttgaacccgggaggcggaggttgcagtgagctaagatcgcgccactgtactccagcctgggcaacagcgagactccatctcaaaaaaaaaggaaatgtgtatcaagaacatgattatccagcggtattttctaattcagatcatcaaactgattatatagaagagttggctttaaaatgtttgcaaatgtctttttttttttaatactggaagaaaaaatattctgttgtgtctcatacagtgcttaggatgtctttcacagagcttattaaaaagatgaaacctgagaacaaactgctttattcttactcagcccattttgcaaattaaaagtgggggcagaggtgggcggatcacctgaggtcaggagttcgagaccagcctggccaacagggcaaaaccccatctctactaaaaatacaaaagttagcggggcgtggtggcgggtgcatgtaatcccagctactcgggaggctgaggcaggagaattgcttgaacccaggaggcggaagttgcagtgagctgagattgtgccactgcactccagcctaggtgacagcaagactctgtctcaaaaaaaaaaaaatggcacatcaacgagagggaggcttggagaatatttggttggtgggtgggcagggactgccagagggttaggtgtacattgaggcctgaggcctgctggaattgggtttccttaactggtctcttatcttagtcccattgttctgagaacataagcacctaatctcatggcgtgagctaatccctatcataaatagtggtaccagttcattccttcccctgaaatgatgggggttgggcagagatgcactgaactcatctttgtgtatgagggccatgagagaggcctggtttgaaaacaatgctaagagctcagattccaggatttatgtaggggctcttctacttcccaggtatttgacctcaggtgagtcatttaatttcagccttatgccattttacattttctgtggagggttaggttaattggcatataaagccactgagaagagttggcaaagctctcagtcacggggatttgatc

SEQ ID NO: 4355 - DNA, 1130 bp, Homo sapiens
  source 1..1130: mol_type = genomic DNA
atgcgcaatgtggccccctaatggtggctgcgctgagccagctcctcagattaccaccttattggccgcctttctcagcttttctgtagttacccatattttgttcctctttcttgtctattttctgtgctttttctctgctttccgtctcgctattttctcacatctccattttctttctccttcctgccaccattcttcatgttcttcccacaggacttgaactgccatgtcctctgaagaaggaaagctcttcgtgggagggctcaactttaacaccgacgagcaggcactggaagaccacttcagcagtttcggacctatctctgaggtggtcgttgtcaaggaccgggagactcagcggtccaggggttttggtttcatcaccttcaccaacccagagcatgcttcagttgccatgagagccatgaacggagagtctctggatggtcgtcagatccgtgtggatcatgcaggcaagtctgctcggggaaccagaggaggtggctttggggcccatgggcgtggtcgcagctactctagaggtggtggggaccagggctatgggagtggcaggtattatgacagtcgacctggagggtatggatatggatatggacgttccagagactataatggcagaaaccagggtggttatgaccgctactcaggaggaaattacagagacaattatgacaactgaaatgagacatgcacataatatagatacacaaggaataatttctgatccaggatcgtccttccaaatggctgtatttataaaggtttttggagctgcaccgaagcatcttattttatagtatatcaaccttttgtttttaaattgacctgccaaggtagctgaagaccttttagacagttccatctttttttttaaattttttctgcctatttaaagacaaattatgggacgtttgtagaacctgagtatttttctttttaccagttttttagtttgagctcttaggtttattggagctagcaataattggttctggcaagtttggccagactgacttcaaaaaattaatgtgtatccagggacattttaaaaacctgtacacagtgtttattgtggttaggaagcaatttcccaatgtacctataag

SEQ ID NO: 4356 - DNA, 1884 bp, Homo sapiens
  source 1..1884: mol_type = genomic DNA
tggttgacctgccttgggcttaggtagtagagtctgcagacctgtgggcctggcccggagaggacctcgtgagtcttctgacatggactctgaagcctcaaaccaagagaggtgtctgtctagccctgatagtcgggcagcttagaggagtggggaggagaactcagcctgagttcagtcaagatgtaagtagtagcaaggggaacatggtgcattcaggtcattttgtgtgggattctatagctcctgatgaagccattctggggtaaaggagcttattctggaacatggcacccagaacctggtgcccagcaggaatttttggcctcttttgcccacttacccttgcctgctcttccctcaccattgccctgactgactgccaacccatcatccttgtgtctcccacacttagtctctggatggtcgtcagatccgtgtggatcatgcaggcaagtctgctcggggaaccagaggaggtggctttggggcccatgggcgtggtcgcagctactctagaggtggtggggaccagggctatgggagtggcaggtattatgacagtcgacctggagggtatggatatggatatggacgttccagagactataatggcagaaaccagggtggttatgaccgctactcaggaggaaattacagagacaattatgacaactgaaatgagacatgcacataatataggtgagacttggatatcggcattgagtgaacctgtttgtcacactctgtcatgaccctctcaccttttctggcaagactgctctgcatttctgctgccctcatacctcacccagccaacctaccaaacattcctagctaggccttccttgctctcaggtgcatatcagagcaagtttgctagggggtgggatctgaaaacccatctcctataatcttctactcttgtgtgggatggaggaaatgaaggtgtgtccctgttgtccaaccctcagcatcttcatcagctctaggaggtgagcatgttgtcagctgttacttcatgacatcacaattctccccctcttgctgttcccagatacacaaggaataatttctgatccaggatcgtccttccaaatggctgtatttataaaggtttttggagctgcaccgaagcatcttattttatagtatatcaaccttttgtttttaaattgacctgccaaggtagctgaagaccttttagacagttccatctttttttttaaattttttctgcctatttaaagacaaattatgggacgtttgtagaacctgagtatttttctttttaccagttttttagtttgagctcttaggtttattggagctagcaataattggttctggcaagtttggccagactgacttcaaaaaattaatgtgtatccagggacattttaaaaacctgtacacagtgtttattgtggttaggaagcaatttcccaatgtacctataagaaatgtgcatcaagccagcctgaccaacatggtgaaaccccatctgtactaaacataaaaaaattagcctggcatggtggtgtacgcctgtaatcccagtgacttgggaggctgaggcaggagaatcgcttgaacccgggaggcggaggttgcagtgagctaagatcgcgccactgtactccagcctgggcaacagcgagactccatctcaaaaaaaaaggaaatgtgtatcaagaacatgattatccagcggtattttctaattcagatcatcaaactgattatatagaagagttggctttaaaatgtttgcaaatgtctttttttttttaatactggaagaaaaaatattctgttgtgtctcatacagtgcttaggatgtctttcacagagcttattaaaaagatgaaacctgagaacaaa

SEQ ID NO: 4357 - DNA, 3747 bp, Homo sapiens
  source 1..3747: mol_type = genomic DNA
gccaaccattttcggccaggctgagaaatttcttattgatgggtctgctcatttcctgcataggaagaaatcggtgacatttgggtggatacagttcccagccaatcgccccgagttccctcgcccactggggaaagaggcagagcttccgctagtctttcatcttcaaaggaaatcaagcttctaaaaagcgggccctgccgaattggctaatagctactccttttctccactaggggagcgttcgcaaggggtgtggggaggtggccagcgcttgccaatcagaggaggccagggctgtcccctagcgggcggtgaccaatcgccggggccggccagagcgcgcttccttagtaggtggatggtggtcggagcgccgactcccttctcgtcgtcgccattttgagctggtgactgtggccggctgggagtaggcggcagtgagtttccctgggagggcagcgcgcttggcgcttctcccctccccccgatctgcctccagtctcggacttggttgttgcgcgctccggctccggctgagctgggagagttggaggaggtggcggcgggcagaggtgatgtctgggagcccttccttgacagcccgggccgagaagagtccctgcaggaagcatcacccaggctggcagatcatggtagcagcagcgggggtggctgggaagtgaaacggagccagcggctgaggaggggccccagcagcccccgaaggccctatcaggacatggagtatgaaagacgtggtggtcgtggtgacaggactggccgctatggagccactgaccgctcgcaggatgatggtggggagaaccgcagccgagaccacgactaccgggacatggactaccgttcatatcctcgcgagtatggcagccaggagggcaagcatgactatgacgactcatctgaggagcagagtgcggaggattcctacgaggcctccccgggctccgagactcagcgtaggcggcggcggcggcacaggcacagccccaccggcccgccaggcttcccccgagacggcgactatcgggaccaggactatcggaccgagcaaggggaggaggaggaggaggaggaggatgaggaggaggaggagaaggccagtaacatcgtcatgctgaggatgctgccacaggcagccactgaggatgacatccgtggccagctgcagtcgcacggcgtgcaagcacgggaggttcggctgatgcggaacaaatcttcaggtcagagccggggcttcgccttcgtcgagtttagtcacttgcaggacgctacacgatggatggaagccaatcagcactccctcaacatcctgggccagaaggtgtcgatgcactacagtgaccccaagcccaagatcaatgaggactggctgtgcaataagtgtggcgtccagaacttcaaacgccgagagaagtgcttcaaatgtggcgtgcccaagtcagaggcagagcagaagctgcccctcggcacgaggctggatcagcagacactgccactgggtggccgggagctgagccagggcctgcttcccctgccgcagccctaccaggcccagggagtcctggcctcccaagccctgtcacagggctcggagccaagctcagagaacgccaatgacaccatcattttgcgcaacctgaacccacacagcaccatggattccatcctgggggccctggcaccctacgcggtgctgtcctcctccaacgtgcgcgtcataaaggacaagcagacccaactgaaccgcggctttgccttcatccagctctccaccatcgtggaggcagcccagctgctgcagatcctgcaggccctgcacccaccactcactatcgacggcaagaccatcaatgttgagtttgccaagggttctaagagggacatggcctccaatgaaggcagtcgcatcagtgctgcctctgtggccagcactgccattgctgcggcccagtgggccatctcacaggcctcccaaggtggggagggtacctgggccacctccgaggagccgccggtcgactacagctactaccaacaggatgagggctatggcaacagccagggcacagagtcttccctctatgcccatggctacctcaagggcaccaagggccctggcatcactggaaccaaaggggatcccactggagcaggtcccgaggcctccctagagcctggggccgactctgtgtcgatgcaggctttctctcgcgcccagcctggtgctgctcctggcatctaccaacaatcagccgaggcgagcagtagccagggcactgctgccaacagccagtcgtataccatcatgtcacccgctgtgctcaaatctgagctccagagccctacccatcctagttctgctctcccaccggctaccagccccactgcccaggaatcctacagccagtaccctgttcccgacgtctctacctaccagtacgatgagacctccggctactactatgacccccagaccggcctctactatgaccccaactcccagtattactacaatgctcagagccagcagtacctgtactgggatggggagaggcggacctatgttcccgccctggagcagtcggccgacggacataaggagacaggggcaccctcgaaggagggcaaagagaagaaggagaagcacaagaccaagacagctcaacagattgccaaggacatggaacgctgggcccgcagtctcaacaaacaaaaagaaaacttcaaaaatagcttccagcctatcagctccctgcgagatgacgagaggcgggagtcagccactgcagatgctggctatgccatcctcgagaagaagggagcactagccgagagacagcacaccagcatggatctcccgaaattggccagtgacgaccgcccaagccctccgcgaggactggtggcagcctacagcggggagagtgacagtgaggaggagcaggagcgtgggggccctgagcgggaggagaagctcaccgactggcagaagctggcctgtctgctctgccgacgccagttccccagcaaagaggcgctcatccggcaccagcagctctcagggctccacaagcaaaaccttgagattcaccggcgagcccacttgtcagaaaacgagctagaagcactagagaagaatgacatggagcaaatgaagtaccgggaccgtgcagctgaacgcagagaaaagtatggcatccccgagccgccagagcccaagaggaggaagtacggcggcatatccacagcctctgtagacttcgagcagcctactcgggacgggctgggcagtgacaacattggcagtcggatgctgcaggccatgggctggaaagagggcagcggcctgggccgcaagaagcagggcattgtaacgcctatcgaggcccaaacacgggtgcggggctccggcctgggtgcacggggcagctcctacggggtcacctcaaccgagtcctacaaggagacactgcacaagacaatggtgacccgcttcaacgaggcccagtgagcagcttcaagagcaacttctccacatgttgggtgtccatcctggggcagggaaggacagagtgttggatggctgggacggggccttgctcttgtcggccagcccactccccagccagagagggcttgaccaaatcaaattgaggtggtgacttttgttggaaaattgggctgggatcacgtcctgttttgtaataaaagctgaaaagtctg

SEQ ID NO: 4358 - DNA, 3151 bp, Homo sapiens
  source 1..3151: mol_type = genomic DNA
ggtggtcggagcgccgactcccttctcgtcgtcgccattttgagctggtgactgtggccggctgggagtaggcggcagtgagtttccctgggagggcagcgcgcttggcgcttctcccctccccccgatctgcctccagtctcggacttggttgttgcgcgctccggctccggctgagctgggagagttggaggaggtggcggcgggcagaggtgatgtctgggagcccttccttgacagcccgggccgagaagagtccctgcaggaagcatcacccaggctggcagatcatggtagcagcagcgggggtggctgggaagtgaaacggagccagcggctgaggaggggccccagcagcccccgaaggccctatcaggacatggagtatgaaagacgtggtggtcgtggtgacaggactggccgctatggagccactgaccgctcgcaggatgatggtggggagaaccgcagccgagaccacgactaccgggacatggactaccgttcatatcctcgcgagtatggcagccaggagggcaagcatgactatgacgactcatctgaggagcagagtgcggagatccgtggccagctgcagtcgcacggcgtgcaagcacgggaggttcggctgatgcggaacaaatcttcaggtcagagccggggcttcgccttcgtcgagtttagtcacttgcaggacgctacacgatggatggaagccaatcagcactccctcaacatcctgggccagaaggtgtcgatgcactacagtgaccccaagcccaagatcaatgaggactggctgtgcaataagtgtggcgtccagaacttcaaacgccgagagaagtgcttcaaatgtggcgtgcccaagtcagaggcagagcagaagctgcccctcggcacgaggctggatcagcagacactgccactgggtggccgggagctgagccagggcctgcttcccctgccgcagccctaccaggcccagggagtcctggcctcccaagccctgtcacagggctcggagccaagctcagagaacgccaatgacaccatcattttgcgcaacctgaacccacacagcaccatggattccatcctgggggccctggcaccctacgcggtgctgtcctcctccaacgtgcgcgtcataaaggacaagcagacccaactgaaccgcggctttgccttcatccagctctccaccatcgaggcagcccagctgctgcagatcctgcaggccctgcacccaccactcactatcgacggcaagaccatcaatgttgagtttgccaagggttctaagagggacatggcctccaatgaaggcagtcgcatcagtgctgcctctgtggccagcactgccattgctgcggcccagtgggccatctcacaggcctcccaaggtggggagggtacctgggccacctccgaggagccgccggtcgactacagctactaccaacaggatgagggctatggcaacagccagggcacagagtcttccctctatgcccatggctacctcaagggcaccaagggccctggcatcactggaaccaaaggggatcccactggagcaggtcccgaggcctccctagagcctggggccgactctgtgtcgatgcaggctttctctcgcgcccagcctggtgctgctcctggcatctaccaacaatcagccgaggcgagcagtagccagggcactgctgccaacagccagtcgtataccatcatgtcacccgctgtgctcaaatctgagctccagagccctacccatcctagttctgctctcccaccggctaccagccccactgcccaggaatcctacagccagtaccctgttcccgacgtctctacctaccagtacgatgagacctccggctactactatgacccccagaccggcctctactatgaccccaactcccagtattactacaatgctcagagccagcagtacctgtactgggatggggagaggcggacctatgttcccgccctggagcagtcggccgacggacataaggagacaggggcaccctcgaaggagggcaaagagaagaaggagaagcacaagaccaagacagctcaacagattgccaaggacatggaacgctgggcccgcagtctcaacaaacaaaaagaaaacttcaaaaatagcttccagcctatcagctccctgcgagatgacgagaggcgggagtcagccactgcagatgctggctatgccatcctcgagaagaagggagcactagccgagagacagcacaccagcatggatctcccgaaattggccagtgacgaccgcccaagccctccgcgaggactggtggcagcctacagcggggagagtgacagtgaggaggagcaggagcgtgggggccctgagcgggaggagaagctcaccgactggcagaagctggcctgtctgctctgccgacgccagttccccagcaaagaggcgctcatccggcaccagcagctctcagggctccacaagcaaaaccttgagattcaccggcgagcccacttgtcagaaaacgagctagaagcactagagaagaatgacatggagcaaatgaagtaccgggaccgtgcagctgaacgcagagaaaagtatggcatccccgagccgccagagcccaagaggaggaagtacggcggcatatccacagcctctgtagacttcgagcagcctactcgggacgggctgggcagtgacaacattggcagtcggatgctgcaggccatgggctggaaagagggcagcggcctgggccgcaagaagcagggcattgtaacgcctatcgaggcccaaacacgggtgcggggctccggcctgggtgcacggggcagctcctacggggtcacctcaaccgagtcctacaaggagacactgcacaagacaatggtgacccgcttcaacgaggcccagtgagcagcttcaagagcaacttctccacatgttgggtgtccatcctggggcagggaaggacagagtgttggatggctgggacggggccttgctcttgtcggccagcccactccccagccagagagggcttgaccaaatcaaattgaggtggtgacttttgttggaaaattgggctgggatcacgtcctgttttgtaataaaagctgaaaagtctgc

SEQ ID NO: 4359 - DNA, 3108 bp, Homo sapiens
  source 1..3108: mol_type = genomic DNA
gtgactgtggccggctgggagtaggcggcagtgagtttccctgggagggcagcgcgcttggcgcttctcccctccccccgatctgcctccagtctcggacttggttgttgcgcgctccggctccggctgagctgggagagttggaggaggtggcggcgggcagaggtgatgtctgggagcccttccttgacagcccgggccgagaagagtccctgcaggaagcatcacccaggctggcagatcatggtagcagcagcgggggtggctgggaagtgaaacggagccagcggctgaggaggggccccagcagcccccgaaggccctatcaggacatggagtatgaaagacgtggtggtcgtggtgacaggactggccgctatggagccactgaccgctcgcaggatgatggtggggagaaccgcagccgagaccacgactaccgggacatggactaccgttcatatcctcgcgagtatggcagccaggagggcaagcatgactatgacgactcatctgaggagcagagtgcggagatccgtggccagctgcagtcgcacggcgtgcaagcacgggaggttcggctgatgcggaacaaatcttcaggtcagagccggggcttcgccttcgtcgagtttagtcacttgcaggacgctacacgatggatggaagccaatcagcactccctcaacatcctgggccagaaggtgtcgatgcactacagtgaccccaagcccaagatcaatgaggactggctgtgcaataagtgtggcgtccagaacttcaaacgccgagagaagtgcttcaaatgtggcgtgcccaagtcagaggcagagcagaagctgcccctcggcacgaggctggatcagcagacactgccactgggtggccgggagctgagccagggcctgcttcccctgccgcagccctaccaggcccagggagtcctggcctcccaagccctgtcacagggctcggagccaagctcagagaacgccaatgacaccatcattttgcgcaacctgaacccacacagcaccatggattccatcctgggggccctggcaccctacgcggtgctgtcctcctccaacgtgcgcgtcataaaggacaagcagacccaactgaaccgcggctttgccttcatccagctctccaccatcgtggaggcagcccagctgctgcagatcctgcaggccctgcacccaccactcactatcgacggcaagaccatcaatgttgagtttgccaagggttctaagagggacatggcctccaatgaaggcagtcgcatcagtgctgcctctgtggccagcactgccattgctgcggcccagtgggccatctcacaggcctcccaaggtggggagggtacctgggccacctccgaggagccgccggtcgactacagctactaccaacaggatgagggctatggcaacagccagggcacagagtcttccctctatgcccatggctacctcaagggcaccaagggccctggcatcactggaaccaaaggggatcccactggagcaggtcccgaggcctccctagagcctggggccgactctgtgtcgatgcaggctttctctcgcgcccagcctggtgctgctcctggcatctaccaacaatcagccgaggcgagcagtagccagggcactgctgccaacagccagtcgtataccatcatgtcacccgctgtgctcaaatctgagctccagagccctacccatcctagttctgctctcccaccggctaccagccccactgcccaggaatcctacagccagtaccctgttcccgacgtctctacctaccagtacgatgagacctccggctactactatgacccccagaccggcctctactatgaccccaactcccagtattactacaatgctcagagccagcagtacctgtactgggatggggagaggcggacctatgttcccgccctggagcagtcggccgacggacataaggagacaggggcaccctcgaaggagggcaaagagaagaaggagaagcacaagaccaagacagctcaacagattgccaaggacatggaacgctgggcccgcagtctcaacaaacaaaaagaaaacttcaaaaatagcttccagcctatcagctccctgcgagatgacgagaggcgggagtcagccactgcagatgctggctatgccatcctcgagaagaagggagcactagccgagagacagcacaccagcatggatctcccgaaattggccagtgacgaccgcccaagccctccgcgaggactggtggcagcctacagcggggagagtgacagtgaggaggagcaggagcgtgggggccctgagcgggaggagaagctcaccgactggcagaagctggcctgtctgctctgccgacgccagttccccagcaaagaggcgctcatccggcaccagcagctctcagggctccacaagcaaaaccttgagattcaccggcgagcccacttgtcagaaaacgagctagaagcactagagaagaatgacatggagcaaatgaagtaccgggaccgtgcagctgaacgcagagaaaagtatggcatccccgagccgccagagcccaagaggaggaagtacggcggcatatccacagcctctgtagacttcgagcagcctactcgggacgggctgggcagtgacaacattggcagtcggatgctgcaggccatgggctggaaagagggcagcggcctgggccgcaagaagcagggcattgtaacgcctatcgaggcccaaacacgggtgcggggctccggcctgggtgcacggggcagctcctacggggtcacctcaaccgagtcctacaaggagacactgcacaagacaatggtgacccgcttcaacgaggcccagtgagcagcttcaagagcaacttctccacatgttgggtgtccatcctggggcagggaaggacagagtgttggatggctgggacggggccttgctcttgtcggccagcccactccccagccagagagggcttgaccaaatcaaattgaggtggtgacttttgttggaaaattgggctgggatcacgtcctgttttgtaataaaagctgaaaagtctgca

SEQ ID NO: 4360 - DNA, 1934 bp, Homo sapiens
  source 1..1934: mol_type = genomic DNA
gaccggaggatgttccctgctcaggaggaggccgacaggaccgtgtttgttgggaatttagaggcccgagttcgggaagagattctgtacgagctgttccttcaggcggggccactaaccaaagtgactatatgcaaagacagagaaggaaagccaaagtcttttggatttgtctgctttaaacacccagaatcggtgtcttatgccatagctttgctgaatggaattcgtttatatggaagaccaattaacgtgcagtatcgatttgggagttctcgctcttctgaaccagctaaccaaagttttgagagctgtgttaagataaattcacacaactacaggaatgaagaaatgttggtgggcagatcttcctttcccatgcagtattttccaattaataatacttctttacctcaagaatattttctctttcagaagatgcagtggcatgtgtataatccagtgctgcagcttccttactatgaaatgacagctccacttcctaatagtgcatccgtgtcttcctcactgaatcatgttccagatcttgaggctggacccagctcatataaatggactcaccaacaaccaagtgactctgacctttatcagatgacagctccacttcctaatagtgcatccgtgtcttcctcactgaatcatgttccagatcttgaggctggacccagctcatataaatggactcaccaacaaccaagtgactctgacctttatcagatgaataaacgaaagagacaaaagcaaacaagtgatagtgatagtagcacagacaacaacagaggcaacgaatgtagccaaaagttccgaaagtctaagaagaagaaaagatactagtattacctacaaatgaaacttacctacactgatcttagttctcttatgaaaaaaataagatgttatcccatcaaataaacaatgtcatggctatcttgtcttttgaaatatgtagtaataagacttatctctggtttgctgttcaatttttgccttgaacgacaaaagctttctaaaaatagtataatgtaccactttttgtatttgtcatgatatttttgacccattggcaacaaatagactattgtcattttattagtaccaatgatgaaatttcaccaaactattaatcaaaagtcacttattgaacacattgataaagcatcatgttccctttgattatcccctataaccaacactcaactacaaataggctgggattcaatgtggagtggtggatttcctgaaagaaagtagtgcagatatttaaggattgcatattgttcctaatgaggatgtaataaacaggcattagtacccctttcttttagtacctaaatatgttgtttctgagccatattcttcttcaggtttattttataaagtgaggacatatgataatgataccaaaggaaagataattatcatgaaaccaacttttggatcattccctttttatacaattgtgtatttatagggataccttcctcttctcacatattaattgtatgtcattaaaatcagttggctatgtcagtgtgtattattcacctcttttgctagcaaggtttgagatgctatattaacatttaaatcatgaaaatgagcaagtaaatagaataatattttattaatgtatgatatgtaatacttattgtctaaatcaagtttcctatttttggtttatttattttagaagaaaaataaaattatttgggcatttttgtttatagctcattacaaactagagtgatgaatatatatatttactaaagctaattgaaagagtcatgcaactcagttgggaattaaccactcaattcaatagtaaaagccatgcttggatgtttcttttgcatgttgcctagcattttatagatatttattatttaaaaaaataaagatatgtttttaatgaa

SEQ ID NO: 4361 - DNA, 5332 bp, Homo sapiens
  source 1..5332: mol_type = genomic DNA
ggcgaaggaggtggtggctgcgttgggctccgggaagccgttcgggctggggctgtcggccgcggggcggaggcactcgcgcggggggtaattcggggtctgggttctggtgccgcgcagctttccccggtgtgtgtggtttcagcgcagcatggctgtggtcatccgtttgcaaggtctcccaattgtggcggggaccatggacattcgccacttcttctctggattgaccattcctgatgggggcgtgcatattgtagggggtgaactgggtgaggctttcatcgtttttgccactgatgaagatgcaaggcttggtatgatgcgcacaggtggtacaattaaagggtcaaaagtaacactattgttgagtagtaagacggaaatgcagaatatgattgaactgagtcgtaggcgttttgaaactgccaacttagatataccaccagcaaatgccagtagatcaggaccaccacctagctcaggaatgagtagcagggtaaacttgcccacaacagtatccaactttaataatccatcacccagtgtagttactgccaccacttctgttcatgaaagcaacaaaaacatacagacattttccacagccagcgtaggaacagctcctccaaatatgggggcttcctttgggagcccaacgtttagctcaactgttccaagcacagcctctccaatgaacacagtcccgccgccaccaattcctccaattccagcgatgccatctctgccaccaatgccatccattcccccaattccagttcctcctccagtacctacattgcctcctgtgcctcctgtgcccccgattcccccagttccttctgtgccacccatgaccccactgccacccatgtcgggcatgccgcccttgaatccgccacctgtggcacctctacctgctggaatgaatggctctggagcacctatgaatttgaacaataatctgaatcctatgtttcttggtccgttgaatcctgttaaccctatccagatgaactctcagagcagtgtgaagccactccccatcaaccctgatgatctgtatgtcagtgtgcatggaatgcccttttctgcaatggaaaatgatgtcagagatttttttcatgggctccgtgttgatgcagtgcatttgttgaaagatcatgtaggtcgaaataatgggaatggattggttaagtttctctcccctcaagatacatttgaagctttgaaacgaaacagaatgctgatgattcaacgctatgtggaagttagccctgccacagaaagacagtgggtagctgctggaggccatatcacttttaagcaaaatatgggaccttctggacaaactcatccccctcctcagacacttcccaggtcaaaatcgcccagtgggcagaaaagatcaaggtcaagatcaccacatgaggctggtttttgtgtttacttgaaagggctaccatttgaagcagaaaacaaacatgtcattgatttttttaaaaagctggatattgtggaagatagtatttatatagcttatggacccaatgggaaagcaactggcgaaggctttgtagagttcagaaatgaggctgactataaggctgctctgtgtcgtcataaacagtacatgggcaatcgctttattcaagttcatccaattactaagaaaggtatgctagaaaagatagatatgattcgaaaaagactgcagaacttcagctatgaccagagggaaatgatactaaatccagagggggatgtcaactctgccaaagtctgtgcccacataacaaatattccattcagcattacaaagatggatgttcttcagttcctagaaggaatcccagtggatgaaaatgctgtacatgttcttgttgataacaatgggcaaggtctaggacaggcattggttcagtttaaaaatgaagatgatgcacgtaagtctgaacgcttacaccgtaaaaaacttaatgggagagaagcttttgttcatgtagttaccctagaagatatgagagagattgagaaaaatccccctgcccaaggaaaaaagggattaaagatgcctgtgccaggtaatcctgcagttccaggaatgcccaatgcgggactgcccggtgtgggactgcccagtgcaggacttcccggtgcaggcctgcccagcacaggactgcctggttcagcaataaccagtgcaggactgcctggtgcgggaatgcccagtgcaggaatacctagtgcaggaggtgaagagcatgccttcctgactgtaggatcaaaggaagccaataatgggcctccatttaactttcctggtaattttggtggatcaaatgcctttgggccaccaatccctcctccaggattaggaggcggggcctttggtgatgctaggcctggtatgccttcagttggaaacagtggtttgcctggtctaggactggatgttccgggttttggaggtggaccaaacaatttaagtgggccatcgggatttggagggggccctcagaattttggaaatggccctggtagcttaggcggtcccccggggtttggaagtggccctcctggtcttggaagtgcccctgggcatttgggtgggccaccagcttttgggcctggccccggccccggccccggccctggcccaatccatattggtggtccccctggctttgcatctagttctggaaaaccaggaccgacagtaattaaagtgcaaaacatgccctttactgtgtctattgatgagattttagatttcttttatggctatcaagtaatcccaggctcagtgtgtttaaaatacaatgaaaaaggtatgcccacaggtgaagccatggtggcctttgagtctcgggatgaagccacagctgctgtcattgacttaaatgacaggcctataggttcaagaaaagtaaaacttgtattagggtagccattcacatcattttttatagggtagatcttcatattgctgtgattaatgcatccagattgttttcctagtatttccaggttagaacctgtggattgtttcaattgcatatagcttggtttccataacatagagcattggttgactgtttacagaagactcactcaccaggataaacattgctgtatgttacagtaaagctatctggagagaacacataaatgattttggcataccattagagaaaccatttgtaaaactcaaatgaccacataaagcttatcaaggagtctagattggttttgttttataccatatgggatgaagaaaatagaaatgtcagtagaactcattgagggtgctcttgccagctgctgaaaatagaagttggctactctcagaatttggtttaaagctggacagatttgctttgttatagggtaaagctttgtctaaagtcctcattttcttttaaaattgaataaaatttctgtatacagattcattgtatgtacctttattgcttcttaagggtccttgctgtatagacagtcctgcttcagaagttgctgctttgtttgtctaattgactcatttgtaaatgagcagaactgttttgttggtttttttccctaaatataaaagtccacacttcgtttgtgctataacctcaaactttgatttctaatgtcacacttaaaactgtgtggaataagacttttgccataaaaataaactatggagtcctttatctaccagagcctttttggtttgaccgccacgatttaggttagtcagtttaaaaattgttcatgttgtttggatggtatcgaaaaccagaaaccacttttaataatgtgtttaagatacttgatttgaagtccttttcatatggactaattgtagtatcaatttcctcctgtcccgattatgtgaaattttggcctttaaacaaagaggggcccattcataagaaagtgttatatctaggtttttaaaactgaagttgaaattatctttgttagcagtagtagtatagaataaaagatccgtatgctggttcgtagattgatacgtgttagtcctgttatttggaggctttttggcatagttgttcgatcaggagcctgtttactaaaagtcttcatacagagtacaagtgcagccgccagaggagaaaattgagattcttgaccctttcatactcttttctttggtattcaggacactaaggcaggaggaccacatgagttctggttggtaagtgtccttgtcatgaaaacacttgccttacaaggctctaattatgatttccctagtcagtgctctgaagatgtgtcacattatattataaacaatacggaaggggagataggtgagatgatatgaaaaacaaattttctcactgtcataaaaggctctaattatggttactttccttgtgatgaaaaacttggccttacagggctctagttatggttactttccctagtcaatgctctgaaaatgtgtcacattataaacaatacagaaggagagatagatgagagatcatgaaaaccaaattttatcttttacatggcccctttgtcttcgtttgaaacatccccaacatttcctacaaatcagcgtagttacaaaggggtcagtcttttaaaataagtatttcctattaaactatatatatatacagtgcctttttggtgttgtgagtcagtggaacactgaaatacagcggttgtgtaatttaagagtggcaacagtttcatttgataagatttgaaaaggctttttatcactacaatcttagaggattgacagtacaggatttttgtttaagagaaggattgtttagactcaagaggtgactatgttgtgggtcttttgataattcatgaatacagatttgctttgaccgatcactagatactgcctcctcaatttcaaaagcaatataacgtttgtatatgctgtttaatttaagttaatgttaagtaatcatttctcattccaaagacaatgcaaaaaacttcagcactgcttgagagttgtatttcagccacagatattttctccattggaaagctattttcattttagaaaaatgggttgtttgaagatgaaagtcttttatcttttttcacaatttattttggttatatgttcgtacattcttattaaatatttcatacactttattgcaactactttgttatttctacatcttagataaatgctgaaaaggaaaacgatttcattgttcatctaattaaataaattaaaagagcggtttgtgtagaaattggagagaactatgttttatatgaatcacaacagtgctcgttgtggactgtaattaaatgctttgccctctggaacttg

SEQ ID NO: 4362 - DNA, 5213 bp, Homo sapiens
  source 1..5213: mol_type = genomic DNA
attttgtgaagcggcgaaggaggtggtggctgcgttgggctccgggaagccgttcgggctggggctgtcggccgcggggcggaggcactcgcgcggggggtaattcggggtctgggttctggtgccgcgcagctttccccggattgacttggcctctacttcttgttaaggaaattcatctcttgttttatcaggtgtgtgtggtttcagcgcagcatggctgtggtcatccgtttgcaaggtctcccaattgtggcggggaccatggacattcgccacttcttctctggattgaccattcctgatgggggcgtgcatattgtagggggtgaactgggtgaggctttcatcgtttttgccactgatgaagatgcaaggcttggtatgatgcgcacaggtggtacaattaaagggtcaaaagtaacactattgttgagtagtaagacggaaatgcagaatatgattgaactgagtcgtaggcgttttgaaactgccaacttagatataccaccagcaaatgccagtagatcaggaccaccacctagctcaggaatgagtagcagggtaaacttgcccacaacagtatccaactttaataatccatcacccagtgtagttactgccaccacttctgttcatgaaagcaacaaaaacatacagacattttccacagccagcgtaggaacagctcctccaaatatgggggcttcctttgggagcccaacgtttagctcaactgttccaagcacagcctctccaatgaacacagtcccgccgccaccaattcctccaattccagcgatgccatctctgccaccaatgccatccattcccccaattccagttcctcctccagtacctacattgcctcctgtgcctcctgtgcccccgattcccccagttccttctgtgccacccatgaccccactgccacccatgtcgggcatgccgcccttgaatccgccacctgtggcacctctacctgctggaatgaatggctctggagcacctatgaatttgaacaataatctgaatcctatgtttcttggtccgttgaatcctgttaaccctatccagatgaactctcagagcagtgtgaagccactccccatcaaccctgatgatctgtatgtcagtgtgcatggaatgcccttttctgcaatggaaaatgatgtcagagatttttttcatgggctccgtgttgatgcagtgcatttgttgaaagatcatgtaggtcgaaataatgggaatggattggttaagtttctctcccctcaagatacatttgaagctttgaaacgaaacagaatgctgatgattcaacgctatgtggaagttagccctgccacagaaagacagtgggtagctgctggaggccatatcacttttaagcaaaatatgggaccttctggacaaactcatccccctcctcagacacttcccaggtcaaaatcgcccagtgggcagaaaagatcaaggtcaagatcaccacatgaggctggtttttgtgtttacttgaaagggctaccatttgaagcagaaaacaaacatgtcattgatttttttaaaaagctggatattgtggaagatagtatttatatagcttatggacccaatgggaaagcaactggcgaaggctttgtagagttcagaaatgaggctgactataaggctgctctgtgtcgtcataaacagtacatgggcaatcgctttattcaagttcatccaattactaagaaaggtatgctagaaaagatagatatgattcgaaaaagactgcagaacttcagctatgaccagagggaaatgatactaaatccagagggggatgtcaactctgccaaagtctgtgcccacataacaaatattccattcagcattacaaagatggatgttcttcagttcctagaaggaatcccagtggatgaaaatgctgtacatgttcttgttgataacaatgggcaaggtctaggacaggcattggttcagtttaaaaatgaagatgatgcacgtaagtctgaacgcttacaccgtaaaaaacttaatgggagagaagcttttgttcatgtagttaccctagaagatatgagagagattgagaaaaatccccctgcccaaggaaaaaagggattaaagatgcctgtgccaggtaatcctgcagttccaggaatgcccaatgcgggactgcccggtgtgggactgcccagtgcaggacttcccggtgcaggcctgcccagcacaggactgcctggttcagcaataaccagtgcaggactgcctggtgcgggaatgcccagtgcaggaatacctagtgcaggaggtgaagagcatgccttcctgactgtaggatcaaaggaagccaataatgggcctccatttaactttcctggtaattttggtggatcaaatgcctttgggccaccaatccctcctccaggattaggaggcggggcctttggtgatgctaggcctggtatgccttcagttggaaacagtggtttgcctggtctaggactggatgttccgggttttggaggtggaccaaacaatttaagtgggccatcgggatttggagggggccctcagaattttggaaatggccctggtagcttaggcggtcccccggggtttggaagtggccctcctggtcttggaagtgcccctgggcatttgggtgggccaccagcttttgggcctggccccggccccggccccggccctggcccaatccatattggtggtccccctggctttgcatctagttctggaaaaccaggaccgacagtaattaaagtgcaaaacatgccctttactgtgtctattgatgagattttagatttcttttatggctatcaagtaatcccaggctcagtgtgtttaaaatacaatgaaaaaggtatgcccacaggtgaagccatggtggcctttgagtctcgggatgaagccacagctgctgtcattgacttaaatgacaggcctataggttcaagaaaagtaaaacttgtattagggtagccattcacatcattttttatagggtagatcttcatattgctgtgattaatgcatccagattgttttcctagtatttccaggttagaacctgtggattgtttcaattgcatatagcttggtttccataacatagagcattggttgactgtttacagaagactcactcaccaggataaacattgctgtatgttacagtaaagctatctggagagaacacataaatgattttggcataccattagagaaaccatttgtaaaactcaaatgaccacataaagcttatcaaggagtctagattggttttgttttataccatatgggatgaagaaaatagaaatgtcagtagaactcattgagggtgctcttgccagctgctgaaaatagaagttggctactctcagaatttggtttaaagctggacagatttgctttgttatagggtaaagctttgtctaaagtcctcattttcttttaaaattgaataaaatttctgtatacagattcattgtatgtacctttattgcttcttaagggtccttgctgtatagacagtcctgcttcagaagttgctgctttgtttgtctaattgactcatttgtaaatgagcagaactgttttgttggtttttttccctaaatataaaagtccacacttcgtttgtgctataacctcaaactttgatttctaatgtcacacttaaaactgtgtggaataagacttttgccataaaaataaactatggagtcctttatctaccagagcctttttggtttgaccgccacgatttaggttagtcagtttaaaaattgttcatgttgtttggatggtatcgaaaaccagaaaccacttttaataatgtgtttaagatacttgatttgaagtccttttcatatggactaattgtagtatcaatttcctcctgtcccgattatgtgaaattttggcctttaaacaaagaggggcccattcataagaaagtgttatatctaggtttttaaaactgaagttgaaattatctttgttagcagtagtagtatagaataaaagatccgtatgctggttcgtagattgatacgtgttagtcctgttatttggaggctttttggcatagttgttcgatcaggagcctgtttactaaaagtcttcatacagagtacaagtgcagccgccagaggagaaaattgagattcttgaccctttcatactcttttctttggtattcaggacactaaggcaggaggaccacatgagttctggttggtaagtgtccttgtcatgaaaacacttgccttacaaggctctaattatgatttccctagtcagtgctctgaagatgtgtcacattatattataaacaatacggaaggggagataggtgagatgatatgaaaaacaaattttctcactgtcataaaaggctctaattatggttactttccttgtgatgaaaaacttggccttacagggctctagttatggttactttccctagtcaatgctctgaaaatgtgtcacattataaacaatacagaaggagagatagatgagagatcatgaaaaccaaattttatcttttacatggcccctttgtcttcgtttgaaacatccccaacatttcctacaaatcagcgtagttacaaaggggtcagtcttttaaaataagtatttcctattaaactatatatatatacagtgcctttttggtgttgtgagtcagtggaacactgaaatacagcggttgtgtaatttaagagtggcaacagtttcatttgataagatttgaaaaggctttttatcactacaatcttagaggattgacagtacaggatttttgtttaagagaaggattgtttagactcaagaggtgactatgttgtgggtcttttgataattcatgaatacagatttgctttgaccgatcactagatactgcctcctcaatttcaaaagcaatataacgtttgtatatgctgtttaatttaagttaatgttaagtaatcatttctcattccaaagacaatgcaaaaaacttcagcactgcttgagagttgtatttcagccacagatattttctccattggaaagctattttcattttagaaaaatgggttgtttgaagatgaaagtcttttatcttttttcacaatttattttggttatatgttcgtacattcttattaaatatttcatacacttta

SEQ ID NO: 4363 - DNA, 6662 bp, Homo sapiens
  source 1..6662: mol_type = genomic DNA
gagcgggccgacggccattttgtgaagcggcgaaggaggtggtggctgcgttgggctccgggaagccgttcgggctggggctgtcggccgcggggcggaggcactcgcgcggggggtaattcggggtctgggttctggtgccgcgcagctttccccgtctaaaagttggttttaattggttgcccacaggattgacttggcctctacttcttgttaaggaaattcatctcttgttttatcaggtgtgtgtggtttcagcgcagcatggctgtggtcatccgtttgcaaggtctcccaattgtggcggggaccatggacattcgccacttcttctctggattgaccattcctgatgggggcgtgcatattgtagggggtgaactgggtgaggctttcatcgtttttgccactgatgaagatgcaaggcttggtatgatgcgcacaggtggtacaattaaagggtcaaaagtaacactattgttgagtagtaagacggaaatgcagaatatgattgaactgagtcgtaggcgttttgaaactgccaacttagatataccaccagcaaatgccagtagatcaggaccaccacctagctcaggaatgagtagcagggtaaacttgcccacaacagtatccaactttaataatccatcacccagtgtagttactgccaccacttctgttcatgaaagcaacaaaaacatacagacattttccacagccagcgtaggaacagctcctccaaatatgggggcttcctttgggagcccaacgtttagctcaactgttccaagcacagcctctccaatgaacacagtcccgccgccaccaattcctccaattccagcgatgccatctctgccaccaatgccatccattcccccaattccagttcctcctccagtacctacattgcctcctgtgcctcctgtgcccccgattcccccagttccttctgtgccacccatgaccccactgccacccatgtcgggcatgccgcccttgaatccgccacctgtggcacctctacctgctggaatgaatggctctggagcacctatgaatttgaacaataatctgaatcctatgtttcttggtccgttgaatcctgttaaccctatccagatgaactctcagagcagtgtgaagccactccccatcaaccctgatgatctgtatgtcagtgtgcatggaatgcccttttctgcaatggaaaatgatgtcagagatttttttcatgggctccgtgttgatgcagtgcatttgttgaaagatcatgtaggtcgaaataatgggaatggattggttaagtttctctcccctcaagatacatttgaagctttgaaacgaaacagaatgctgatgattcaacgctatgtggaagttagccctgccacagaaagacagtgggtagctgctggaggccatatcacttttaagcaaaatatgggaccttctggacaaactcatccccctcctcagacacttcccaggtcaaaatcgcccagtgggcagaaaagatcaaggtcaagatcaccacatgaggctggtttttgtgtttacttgaaagggctaccatttgaagcagaaaacaaacatgtcattgatttttttaaaaagctggatattgtggaagatagtatttatatagcttatggacccaatgggaaagcaactggcgaaggctttgtagagttcagaaatgaggctgactataaggctgctctgtgtcgtcataaacagtacatgggcaatcgctttattcaagttcatccaattactaagaaaggtatgctagaaaagatagatatgattcgaaaaagactgcagaacttcagctatgaccagagggaaatgatactaaatccagagggggatgtcaactctgccaaagtctgtgcccacataacaaatattccattcagcattacaaagatggatgttcttcagttcctagaaggaatcccagtggatgaaaatgctgtacatgttcttgttgataacaatgggcaaggtctaggacaggcattggttcagtttaaaaatgaagatgatgcacgtaagtctgaacgcttacaccgtaaaaaacttaatgggagagaagcttttgttcatgtagttaccctagaagatatgagagagattgagaaaaatccccctgcccaaggaaaaaagggattaaagatgcctgtgccaggtaatcctgcagttccaggaatgcccaatgcgggactgcccggtgtgggactgcccagtgcaggacttcccggtgcaggcctgcccagcacaggactgcctggttcagcaataaccagtgcaggactgcctggtgcgggaatgcccagtgcaggaatacctagtgcaggaggtgaagagcatgccttcctgactgtaggatcaaaggaagccaataatgggcctccatttaactttcctggtaattttggtggatcaaatgcctttgggccaccaatccctcctccaggattaggaggcggggcctttggtgatgctaggcctggtatgccttcagttggaaacagtggtttgcctggtctaggactggatgttccgggttttggaggtggaccaaacaatttaagtgggccatcgggatttggagggggccctcagaattttggaaatggccctggtagcttaggcggtcccccggggtttggaagtggccctcctggtcttggaagtgcccctgggcatttgggtgggccaccagcttttgggcctggccccggccccggccccggccctggcccaatccatattggtggtccccctggctttgcatctagttctggaaaaccaggaccgacagtaattaaagtgcaaaacatgccctttactgtgtctattgatgagattttagatttcttttatggctatcaagtaatcccaggctcagtgtgtttaaaatacaatgaaaaaggtatgcccacaggtgaagccatggtggcctttgagtctcgggatgaagccacagctgctgtcattgacttaaatgacaggcctataggttcaagaaaagtaaaacttgtattagggtagccattcacatcattttttatagggtagatcttcatattgctgtgattaatgcatccagattgttttcctagtatttccaggttagaacctgtggattgtttcaattgcatatagcttggtttccataacatagagcattggttgactgtttacagaagactcactcaccaggataaacattgctgtatgttacagtaaagctatctggagagaacacataaatgattttggcataccattagagaaaccatttgtaaaactcaaatgaccacataaagcttatcaaggagtctagattggttttgttttataccatatgggatgaagaaaatagaaatgtcagtagaactcattgagggtgctcttgccagctgctgaaaatagaagttggctactctcagaatttggtttaaagctggacagatttgctttgttatagggtaaagctttgtctaaagtcctcattttcttttaaaattgaataaaatttctgtatacagattcattgtatgtacctttattgcttcttaagggtccttgctgtatagacagtcctgcttcagaagttgctgctttgtttgtctaattgactcatttgtaaatgagcagaactgttttgttggtttttttccctaaatataaaagtccacacttcgtttgtgctataacctcaaactttgatttctaatgtcacacttaaaactgtgtggaataagacttttgccataaaaataaactatggagtcctttatctaccagagcctttttggtttgaccgccacgatttaggttagtcagtttaaaaattgttcatgttgtttggatggtatcgaaaaccagaaaccacttttaataatgtgtttaagatacttgatttgaagtccttttcatatggactaattgtagtatcaatttcctcctgtcccgattatgtgaaattttggcctttaaacaaagaggggcccattcataagaaagtgttatatctaggtttttaaaactgaagttgaaattatctttgttagcagtagtagtatagaataaaagatccgtatgctggttcgtagattgatacgtgttagtcctgttatttggaggctttttggcatagttgttcgatcaggagcctgtttactaaaagtcttcatacagagtacaagtgcagccgccagaggagaaaattgagattcttgaccctttcatactcttttctttggtattcaggacactaaggcaggaggaccacatgagttctggttggtaagtgtccttgtcatgaaaacacttgccttacaaggctctaattatgatttccctagtcagtgctctgaagatgtgtcacattatattataaacaatacggaaggggagataggtgagatgatatgaaaaacaaattttctcactgtcataaaaggctctaattatggttactttccttgtgatgaaaaacttggccttacagggctctagttatggttactttccctagtcaatgctctgaaaatgtgtcacattataaacaatacagaaggagagatagatgagagatcatgaaaaccaaattttatcttttacatggcccctttgtcttcgtttgaaacatccccaacatttcctacaaatcagcgtagttacaaaggggtcagtcttttaaaataagtatttcctattaaactatatatatatacagtgcctttttggtgttgtgagtcagtggaacactgaaatacagcggttgtgtaatttaagagtggcaacagtttcatttgataagatttgaaaaggctttttatcactacaatcttagaggattgacagtacaggatttttgtttaagagaaggattgtttagactcaagaggtgactatgttgtgggtcttttgataattcatgaatacagatttgctttgaccgatcactagatactgcctcctcaatttcaaaagcaatataacgtttgtatatgctgtttaatttaagttaatgttaagtaatcatttctcattccaaagacaatgcaaaaaacttcagcactgcttgagagttgtatttcagccacagatattttctccattggaaagctattttcattttagaaaaatgggttgtttgaagatgaaagtcttttatcttttttcacaatttattttggttatatgttcgtacattcttattaaatatttcatacactttattgcaactactttgttatttctacatcttagataaatgctgaaaaggaaaacgatttcattgttcatctaattaaataaattaaaagagcggtttgtgtagaaattggagagaactatgttttatatgaatcacaacagtgctcgttgtggactgtaattaaatgctttgccctctggaacttgatttttgtgtatctgagatttattaacagtgctaactgctaaggatactgtttatcttgttctgggcattggagtttcagtttttaaaaaattcttgaaaatgtattctgtgaaactactcatacctctcttcctgcgaattttctcctaagaactaggtttggggtagaaatgaattgacattattttctcatttgctttgtatggtatgaaggatttgtaaagctttgctcaaagttgtgtgcatttgtaaacactatcatgatattttcaattttatgtgtaaattttattgtctgtttttggtgactctgacattaatggaagagaatattttccattagatttaattttttttcctctcccttctgattttttttttattggtgttcatttttcttttgatttaaaggattagagaaatctacaaatgtatgtcataaataagcaaatttgtaaacttttctgaactttagtgaaacatttagttcacaagcataatttggaggtgtgttctgtgtttacacagtagtttggatgtacaattattattagtggctttttaaaaaatgaaacagtgttaagtgaaatgtagttcctagctttgtactccaagttgtcaaagcatcaacaatgaaaattcgattaggaaactttatttaaaatttcaggtagtaatattcagtgtagttaaggccagtcttaacccactggatgaaaatctaggactgtatggaagtaagcaaacattacatttttaggtggaaatagtcagccttgcataaaaacaaggatgcgtgaaagccttaaattccagctcccttttactggagtctgtggttgtgtacaggtatgggccaagtgtaaaatctcatcaattttaagaacactcgggaaatgagtaaagaaaatgtaaaattgctgctagtcaaatcttttggaaagaatttctggaagtggtcactttaaaaattattttccacccttgcaaaattgccacatttaaattgttttactggcagttctatagtagtccagactttagaaaccaaacacaacaaaatggcttgttgccaatatggccacaacattgccagcaaatactgccttggcatcactcagcagaggtttttgtttataaagatgaagtcttgaatactgttcaataaacttgtcaaaaaataaaacaggctgatgcttttaatgctttaactgca

SEQ ID NO: 4364 - DNA, 583 bp, Homo sapiens
  source 1..583: mol_type = genomic DNA
aaccacgccgttcctcccccttctggaacgcggagccgctgagcgggccgacggccattttgtgaagcggcgaaggaggattgacttggcctctacttcttgttaaggaaattcatctcttgttttatcaggtgtgtgtggtttcagcgcagcatggctgtggtcatccgtttgcaaggtctcccaattgtggcggggaccatggacattcgccacttcttctctggattgaccattcctgatgggggcgtgcatattgtagggggtgaactgggtgaggctttcatcgtttttgccactgatgaagatgcaaggcttggtatgatgcgcacaggtggtacaattaaagggtcaaaagtaacactattgttgagtagtaagacggaaatgcagaatatgattgaactgagtcgtaggcgttttgaaactgccaacttagatataccaccagcaaatgccagtagatcaggaccaccacctagctcaggaatgagtagcagggtaaacttgcccacaacagtatccaactttaataatccatcacccagtgtagttactgccaccacttctgttcatgaaagca

SEQ ID NO: 4365 - DNA, 1068 bp, Homo sapiens
  source 1..1068: mol_type = genomic DNA
cggcgaaggaggtggtggctgcgttgggctccgggaagccgttcgggctggggctgtcggccgcggggcggaggcactcgcgcgggggtctaaaagttggttttaattggttgcccacaggattgacttggcctctacttcttgttaaggaaattcatctcttgttttatcaggtgtgtgtggtttcagcgcagcatggctgtggtcatccgtttgcaaggtctcccaattgtggcggggaccatggacattcgccacttcttctctggattgaccattcctgatgggggcgtgcatattgtagggggtgaactgggtgaggctttcatcgtttttgccactgatgaagatgcaaggcttggtatgatgcgcacaggtggtacaattaaagggtcaaaagtaacactattgttgagtagtaagacggaaatgcagaatatgattgaactgagtcgtaggcgttttgaaactgccaacttagatataccaccagcaaatgccagtagatcaggaccaccacctagctcaggaatgagtagcagggtaaacttgcccacaacagtatccaactttaataatccatcacccagtgtagttactgccaccacttctgttcatgaaagcaacaaaaacatacagacattttccacagccagcgtaggaacagctcctccaaatatgggggcttcctttgggagcccaacgtttagctcaactgttccaagcacagcctctccaatgaacacagtcccgccgccaccaattcctccaattccagcgatgccatctctgccaccaatgccatccattcccccaattccagttcctcctccagtacctacattgcctcctgtgcctcctgtgcccccgattcccccagttccttctgtgccacccatgaccccactgccacccatgtcgggcatgccgcccttgaatccgccacctgtggcacctctacctgctggaatgaatggctctggagcacctatgaatttgaacaataatctgaatcctatgtttcttggtccgttgaatcctgttaaccctatccagatgaactctcag

SEQ ID NO: 4366 - DNA, 565 bp, Homo sapiens
  source 1..565: mol_type = genomic DNA
ctggaacgcggagccgctgagcgggccgacggccattttgtgaagcggcgaaggagtctaaaagttggttttaattggttgcccacaggattgacttggcctctacttcttgttaaggaaattcatctcttgttttatcaggtgtgtgtggtttcagcgcagcatggctgtggtcatccgtttgcaaggtctcccaattgtggcggggaccatggacattcgccacttcttctctggattgaccattcctgatgggggcgtgcatattgtagggggtgaactgggtgaggctttcatcgtttttgccactgatgaagatgcaaggcttggtatgatgcgcacaggtggtacaattaaagggtcaaaagtaacactattgttgagtagtaagacggaaatgcagaatatgattgaactgagtcgtaggcgttttgaaactgccaacttagatataccaccagcaaatgccagtagatcaggaccaccacctagctcaggaatgagtagcagggtaaacttgcccacaacagtatccaactttaataatccatcacccagtgtagtt

SEQ ID NO: 4367 - DNA, 2716 bp, Homo sapiens
  source 1..2716: mol_type = genomic DNA
attttgtgaagcggcgaaggaggtggtggctgcgttgggctccgggaagccgttcgggctggggctgtcggccgcggggcggaggcactcgcgcggggggtaattcggggtctgggttctggtgccgcgcagctttccccgtctaaaagttggttttaattggttgcccacaggattgacttggcctctacttcttgttaaggaaattcatctcttgttttatcaggtgtgtgtggtttcagcgcagcatggctgtggtcatccgtttgcaaggtctcccaattgtggcggggaccatggacattcgccacttcttctctggattgaccattcctgatgggggcgtgcatattgtagggggtgaactgggtgaggctttcatcgtttttgccatctctgccaccaatgccatccattcccccaattccagttcctcctccagtacctacattgcctcctgtgcctcctgtgcccccgattcccccagttccttctgtgccacccatgaccccactgccacccatgtcgggcatgccgcccttgaatccgccacctgtggcacctctacctgctggaatgaatggctctggagcacctatgaatttgaacaataatctgaatcctatgtttcttggtccgttgaatcctgttaaccctatccagatgaactctcagagcagtgtgaagccactccccatcaaccctgatgatctgtatgtcagtgtgcatggaatgcccttttctgcaatggaaaatgatgtcagagatttttttcatgggctccgtgttgatgcagtgcatttgttgaaagatcatgtaggtcgaaataatgggaatggattggttaagtttctctcccctcaagatacatttgaagctttgaaacgaaacagaatgctgatgattcaacgctatgtggaagttagccctgccacagaaagacagtgggtagctgctggaggccatatcacttttaagcaaaatatgggaccttctggacaaactcatccccctcctcagacacttcccaggtcaaaatcgcccagtgggcagaaaagatcaaggtcaagatcaccacatgaggctggtttttgtgtttacttgaaagggctaccatttgaagcagaaaacaaacatgtcattgatttttttaaaaagctggatattgtggaagatagtatttatatagcttatggacccaatgggaaagcaactggcgaaggctttgtagagttcagaaatgaggctgactataaggctgctctgtgtcgtcataaacagtacatgggcaatcgctttattcaagttcatccaattactaagaaaggtatgctagaaaagatagatatgattcgaaaaagactgcagaacttcagctatgaccagagggaaatgatactaaatccagagggggatgtcaactctgccaaagtctgtgcccacataacaaatattccattcagcattacaaagatggatgttcttcagttcctagaaggaatcccagtggatgaaaatgctgtacatgttcttgttgataacaatgggcaaggtctaggacaggcattggttcagtttaaaaatgaagatgatgcacgtaagtctgaacgcttacaccgtaaaaaacttaatgggagagaagcttttgttcatgtagttaccctagaagatatgagagagattgagaaaaatccccctgcccaaggaaaaaagggattaaagatgcctgtgccaggtaatcctgcagttccaggaatgcccaatgcgggactgcccggtgtgggactgcccagtgcaggacttcccggtgcaggcctgcccagcacaggactgcctggttcagcaataaccagtgcaggactgcctggtgcgggaatgcccagtgcaggaatacctagtgcaggaggtgaagagcatgccttcctgactgtaggatcaaaggaagccaataatgggcctccatttaactttcctggtaattttggtggatcaaatgcctttgggccaccaatccctcctccaggattaggaggcggggcctttggtgatgctaggcctggtatgccttcagttggaaacagtggtttgcctggtctaggactggatgttccgggttttggaggtggaccaaacaatttaagtgggccatcgggatttggagggggccctcagaattttggaaatggccctggtagcttaggcggtcccccggggtttggaagtggccctcctggtcttggaagtgcccctgggcatttgggtgggccaccagcttttgggcctggccccggccccggccccggccctggcccaatccatattggtggtccccctggctttgcatctagttctggaaaaccaggaccgacagtaattaaagtgcaaaacatgccctttactgtgtctattgatgagattttagatttcttttatggctatcaagtaatcccaggctcagtgtgtttaaaatacaatgaaaaaggtatgcccacaggtgaagccatggtggcctttgagtctcgggatgaagccacagctgctgtcattgacttaaatgacaggcctataggttcaagaaaagtaaaacttgtattagggtagccattcacatcattttttatagggtagatcttcatattgctgtgattaatgcatccagattgttttcctagtatttccaggttagaacctgtggattgtttcaattgcatatagc

SEQ ID NO: 4368 - DNA, 579 bp, Homo sapiens
  source 1..579: mol_type = genomic DNA
cggaggggcagtgggcgccatcttcttctgggctcactgagggtctacctgttttggggaggctgctgcgacgaagagttccctcagcctccggccttgtgtgtccgactcggcagcagtggtcattattgctgtggtttgagctcagcatggctgtagtcatccgtttactggggcttccttttattgcggggcctgtggatattcgtcacttcttcacgggattgactattcctgatggaggagtgcatataattggaggggaaattggggaggcttttattatttttgcaacagatgaagatgcaagacgtgccataagtcgttcaggagggtttatcaaggattcatctgtagagctctttcttagtagcaaggcagaaatgcagaagactatagaaatgaaaagaactgatcgtgtaggaagagggcgtccaggatctgggacatcaggggttgacagcctgtctaattttattgagtctgttaaggaagaagcaagtaattctggatatggctcttcaattaatcaagatgctgggtttcatactaatggtacaggacatggtaatttaaggc

SEQ ID NO: 4369 - DNA, 7269 bp, Homo sapiens
  source 1..7269: mol_type = genomic DNA
gtccgtttgtccggaccggaggggcagtgggcgccatcttcttctgggctcactgagggtctacctgttttggggaggctgctgcgacgaagagttccctcagcctccggccttgtgtgtccgactcggcagcagtgttaagttgcttttacagagttaacaggtctccaagaaattttaaaaaaggtcattattgctgtggtttgagctcagcatggctgtagtcatccgtttactggggcttccttttattgcggggcctgtggatattcgtcacttcttcacgggattgactattcctgatggaggagtgcatataattggaggggaaattggggaggcttttattatttttgcaacagatgaagatgcaagacgtgccataagtcgttcaggagggtttatcaaggattcatctgtagagctctttcttagtagcaaggcagaaatgcagaagactatagaaatgaaaagaactgatcgtgtaggaagagggcgtccaggatctgggacatcaggggttgacagcctgtctaattttattgagtctgttaaggaagaagcaagtaattctggatatggctcttcaattaatcaagatgctgggtttcatactaatggtacaggacatggtaatttaaggccaagaaagacaaggccattgaaggccgagaatccttacttgtttctacgaggtttgccttacctagtaaatgaagatgatgtacgtgtctttttctctggtttgtgcgtggatggagtaattttcttaaaacatcatgatggccgaaataatggtgatgccatagtaaaatttgcttcatgtgttgatgcttcaggaggtcttaaatgtcatagaagttttatgggttcaagatttatagaagtaatgcaaggatcagaacaacagtggattgagtttggtggtaatgcagttaaggagggtgacgttcttaggagatctgaagaacattctccaccaagaggaattaatgatagacattttcgaaaacggtctcattcaaaatctcccagaagaacacgttctcgttcccctcttggattttatgttcacttaaaaaatctgtccctcagtattgacgaaagagatttaagaaatttctttagaggtactgatctgactgatgaacagattaggtttttatataaagatgaaaatagaacaagatatgcctttgtgatgttcaagactctgaaagactataataccgctctgagtttacataagactgttttacaatatcgtccagttcatattgatccaatttctagaaaacaaatgctgaagttcattgcacgttatgaaaagaagagatcagggtcactagagagagataggcccggacatgtttcacaaaaatactctcaagaaggtaactctggccagaaactgtgcatctatataagaaattttccatttgatgttacaaaagttgaagtgcagaagttctttgcagactttcttcttgctgaggatgacatttacttgctttatgatgacaaaggtgttggtctgggagaagcattagtgaaatttaaatcagaagaacaggccatgaaagctgaacgtttaaaccgacgaagattcctagggacagaggtgttattaagacttatatctgaggcacaaatacaggagtttggtgtaaatttttctgtgatgtccagtgaaaaaatgcaagctcgctcacagtcacgtgagcgaggtgaccattcccatttatttgactcaaaagacccaccaatatactcagttggtgcttttgaaaactttagacatcagctagaggacttgaggcaactggataacttcaagcatccccagagggatttccggcagcctgacaggcaccctccagaagacttccgacactcctcagaggactttaggttccccccggaggacttcaggcactccccagaggacttcaggcgacctagggaggaagacttcaggcggccttctgaggaggacttcaggcgcccttgggaggaagatttcaggcgccctccggaggatgacttcaggcaccctagggaggaggactggaggaggccccttgaggaggactggaggcggccactggaggaggatttcaggcggtctcccacggaggacttcaggcagctccccgaggaggacttcaggcaaccccctgaggaggacttaaggtggctcccagaggaagatttcaggcggccacctgaggaggactggagacggcccccagaggaggactttaggcggcctcttcagggagaatggaggcgaccacccgaggatgacttcaggcggcccccagaggaggatttcaggcattcccctgaggaggacttcaggcagtcaccccaggagcatttccggaggccacctcaggagcatttccgtcggccacccccagagcatttccggagaccacctccagagcattttaggcggcctcccccagagcacttccggcggccacccccagagcacttcaggcggccacccccagagcatttcaggcgcccgcccccggagcacttccggagaccgccccaggagcatttcaggcggccgcctcaggagcatttcaggcgctcccgagaggaagatttcaggcacccaccagatgaagacttcaggggccctcctgatgaagactttaggcaccctcctgatgaggacttcaggagcccccaggaggaagattttagatgcccttctgatgaggacttcaggcagctcccagaggaagaccttagggaagctccggaggaggaccctagacttcctgacaattttagacctcctggtgaggattttaggagcccgcctgatgattttagaagtcaccgcccttttgtgaattttggtcgcccagaaggtggcaagtttgattttggaaagcataatatgggaagttttcctgaggggagatttatgcctgatccaaaaataaattgtggttcaggtagagtaactcctattaagataatgaatcttccatttaaagctaatgtgaatgaaattttagactttttccatggttacagaatcatacctgattcagtttcgatacagtataatgagcaaggcttacctacaggggaagccattgttgctatgataaactataatgaagctatggctgctattaaagatctaaatgataggccagttgggccccgaaaagttaagttaactttgctgtagagagagagcatttctaaattcagttatcttccttgcagtattgatggagtaaaatacatttgttttaaaaaagtgttttttttttaaattatctaatgaaatattttatttttgacctgtgaatagaacaaatgtaaatagtagaatgtgaatctggttttcttttgcttgcaaattgccattctttttttttttcaaatttaaaattacacatgctgtttttttctttgatggggagaaagaactcattccctgagttcattcatttttgttgatgtcatcggtaatcttcaagacttattgaagtagagttgtatttggggaagatacattttatattcacttttttttttctttctgtagtctacctcttttactcaaactgtataaggaaatagtgactgattgttcaggtttggcattttcattgctacctgcctgcagaattaatgccctcttccttgtctaagatattactgtgttaagtgtcctgttaattataaatagttcaaaatggacagactgtcaacttgaaatttacttatgtaaaaagcttaggtgattcttagggtttccatgttcataactttacaaagctttataaaaataaaattgcaacttaatagagctaattaacttgtatttgtataaaaagaaaaaagaattgcagctcgatattgtgaagtttttcaataacttcattaaaccatatttatgatgggagggaccagacattctatagtaataatgtatagtgctgtgtataattccatggtttcttcaacatcttatcaaccaagtaaaattaatacaagatacgcaaaagatagtaaaataagaatctaattataggtgcaaggggactcaggcttatgctggaagaatctgacaagtggtatagtttgtttttctaggaagaatttactgatgagtcacataacttgcatgtaatattaggttctcattttttagcttcgaaactgtgtccatgcaaagactctataactgttaagacttgtgtggttgaattttgacttctttgatattcagcatttagtgcatacattttgcaactagggaatttgattttctatacccacaataatatttatggctaacatttattaggcacttactatgtgctaggcactgtaagcactttacatgcataatctcggtattccctgtgagtacagggttaattatttacctctatttcacaaatgagataatgaagtgggatgaagtgcgaggttaagcaacttgcttgaagtcataggtagtaaatcgtggggccaattttaacccagacagaccactgactccagttcatgcttttgctgcctcacttttttaagtggtatttttaattaggaagaccatgctaaagatactttcaaggataaatgattattttctcacttcaattgttggtttaaaattagcataaataggtaaaaccagcatgctcaaacactgagctcaaacattaacattactaataaaaaaaaaaagagtgactttaaaagtttctttctatccagggtttctcttgggatactcatatggtatattactggcttatatttcaaaattattttattcaacatgattgactttggccttttataatttacataaaacataattttcctcagttctgtaatccagattttccccattgagtaaataatacaattaaatttacatatggtaatttagacatttaataggatattgcataggtagaatactttgtcagtacttagttactacctatatgtatttttgtgttacttttcagtgatttaaagaaatctaacagaaatctgcttaaatttgttttaaatagtgaatatcctgcttgctatggaatgaataaacaggtaaatttgatatgaaaaagcacctcagtatgattctttaaagtataagcttgtaagtagctaggataatgttaaattgattgtttggaatatccaaaccaagcacaatgaagaaagtagaaatgatatttttaattgagcaaagattgtatagatggttcatttggtcacccattttgaataatatatggaaagttaaaaaatgcttctcagatacaaaggaataaagctaagatgaagcttaacgtgagggattacttactgtggaattgcatttcaaactgggctgaggtgggatggtggtggtagataagaggccagctagagtaaacataagctttgtagttttattattttaagagtcagagtcttgttctgctggccaggctggagtgcagtggtctgataatggttcactgcagcttctaactcctgggctcaagctgtcttcctgcctcagcctcctgagagctgggactacaggtgtgtgccaccttgtctggctaaattttttattatttgtagagacagagtctcactgtgttgcccaggctgttctcaaatttctggcctcaagcaatcctcactccttggtctcccagaatgtgttgggattacaggtgtgagccactgtgcccagccttgtattttgatttttaaattaatttatatgaatatttccttttaccctataatgtatcagggcttaatatttttaaacttcattataaaaagttgattacagaaagtggtatcttctagttgggagccatctttgcacatctctctccaactctgcctttagtgatatgtcaataacaaattggccatggcaggagtattttacaccatggaaagtgataaatgcagcaaatcaaggaattcccctcctgttgtcccctcagaaagccagcttcccagcacctcatcaatttcaaatataaaaaaagaatagtaaattttcatgtacacatcactcagcttcagtaattgtcgtctcatagccagtttttcctctcctatcctcaaggtataccaggtacactggaggtgtattctctagcctgatacccagtggcatttgtcttaaagccaaacatttttgtctagaaattatctaaaaaaatgtagatcatgtctagaaagtcaatcccacaaccaagagataggtaaaaatcatgttaggagtgcatttctattaatttactgagatcactgttaagagcagtgattcttgatccatatatcacctgttaagtagtgaccttgctgcctctgtttttgcagtaaatattagctgttgtttattgagctgtattagatactatatgatgtataattatgtatgaattaactatcatttaattctgataatcctagtaaatgtactacaggttgagtattcctaatctggtaatctgaaatttcacatgctccgaaaatcacaaactttttgagtgccaacatgatgctcaaagaaaatgctcattgcagcatttaagatttcagatttttgggttaggaatgttgaactggtataatgcaaatactccaaaatctgaagaaatccaaagtcttaaatacttctggtcccaagcacttcagataaaggatactcaatttgtattcctattttggagataagagatggagacttacaggctgggttggttggattggttgcctgttttttgttgttgttgtagtggaagctaggaatggtttttcacattttttaagtgtacttaagtcttacatggttacatagttacctgtataatagtcttgaatttgcctaaacccacgaagaataacagtatttgctatctggccctttaagaagtttgccaacctaggctggtctaaataatgaaaattttacattaatgaaagtattttcatggatagtattccttttgttcttagaatatttctttgaggtaggcagaatgtatgttttattccagaattactgttttacgcagttttaactttacaaacaaggcaaataatgctcaagagaagttgctatttagtaagcagcaaaataataactctgttgttttcccccgaagtacaaccaaatttaaatactgagtgaggaagcagtaaatatccaatgatatcttgagtttcttaagaatatcaatttagggttttaaa

SEQ ID NO: 4370 - DNA, 588 bp, Homo sapiens
  source 1..588: mol_type = genomic DNA
tacctgttttggggaggctgctgcgacgaagagttccctcagcctccggccttgtgtgtccgactcggcagcagtgcttccatgtggtggtgtatgtgcgcttcccagggatcttgagagtgaagatctcgaaggatttcatagttaagttgcttttacagagttaacaggtctccaagaaattttaaaaaaggtcattattgctgtggtttgagctcagcatggctgtagtcatccgtttactggggcttccttttattgcggggcctgtggatattcgtcacttcttcacgggattgactattcctgatggaggagtgcatataattggaggggaaattggggaggcttttattatttttgcaacagatgaagatgcaagacgtgccataagtcgttcaggagggtttatcaaggattcatctgtagagctctttcttagtagcaaggcagaaatgcagaagactatagaaatgaaaagaactgatcgtgtaggaagagggcgtccaggatctgggacatcaggggttgacagcctgtctaattttattgagtctgttaaggaagaagcaagtaattctggatatg

SEQ ID NO: 4371 - DNA, 452 bp, Homo sapiens
  source 1..452: mol_type = genomic DNA
gggcgccatcttcttctgggctcactgagggtctacctgttttggggaggctgctgcgacgaagagttccctcagcctccggccttgtgtgtccgactcggcagcagtggtgtgtgtttattgccaattaagttgcttttacagagttaacaggtctccaagaaattttaaaaaaggtcattattgctgtggtttgagctcagcatggctgtagtcatccgtttactggggcttccttttattgcggggcctgtggatattcgtcacttcttcacgggattgactattcctgatggaggagtgcatataattggaggggaaattggggaggcttttattatttttgcaacagatgaagatgcaagacgtgccataagtcgttcaggagggtttatcaaggattcatctgtagagctctttcttagtagcaaggcagaaatgcagaagactat

SEQ ID NO: 4372 - DNA, 6001 bp, Homo sapiens
  source 1..6001: mol_type = genomic DNA
gtccgtttgtccggaccggaggggcagtgggcgccatcttcttctgggctcactgagggtctacctgttttggggaggctgctgcgacgaagagttccctcagcctccggccttgtgtgtccgactcggcagcagtgttaagttgcttttacagagttaacaggtctccaagaaattttaaaaaaggtcattattgctgtggtttgagctcagcatggctgtagtcatccgtttactggggcttccttttattgcggggcctgtggatattcgtcacttcttcacgggattgactattcctgatggaggagtgcatataattggaggggaaattggggaggcttttattatttttgcaacagatgaagatgcaagacgtgccataagtcgttcaggagggtttatcaaggattcatctgtagagctctttcttagtagcaaggcagaaatgcagaagactatagaaatgaaaagaactgatcgtgtaggaagagggcgtccaggatctgggacatcaggggttgacagcctgtctaattttattgagtctgttaaggaagaagcaagtaattctggatatggctcttcaattaatcaagatgctgggtttcatactaatggtacaggacatggtaatttaaggccaagaaagacaaggccattgaaggccgagaatccttacttgtttctacgaggtttgccttacctagtaaatgaagatgatgtacgtgtctttttctctggtttgtgcgtggatggagtaattttcttaaaacatcatgatggccgaaataatggtgatgccatagtaaaatttgcttcatgtgttgatgcttcaggaggtcttaaatgtcatagaagttttatgggttcaagatttatagaagtaatgcaaggatcagaacaacagtggattgagtttggtggtaatgcagttaaggagggtgacgttcttaggagatctgaagaacattctccaccaagaggaattaatgatagacattttcgaaaacggtctcattcaaaatctcccagaagaacacgttctcgttcccctcttggattttatgttcacttaaaaaatctgtccctcagtattgacgaaagagatttaagaaatttctttagaggtactgatctgactgatgaacagattaggtttttatataaagatgaaaatagaacaagatatgcctttgtgatgttcaagactctgaaagactataataccgctctgagtttacataagactgttttacaatatcgtccagttcatattgatccaatttctagaaaacaaatgctgaagttcattgcacgttatgaaaagaagagatcagggtcactagagagagataggcccggacatgtttcacaaaaatactctcaagaaggtaactctggccagaaactgtgcatctatataagaaattttccatttgatgttacaaaagttgaagtgcagaagttctttgcagactttcttcttgctgaggatgacatttacttgctttatgatgacaaaggtgttggtctgggagaagcattagtgaaatttaaatcagaagaacaggccatgaaagctgaacgtttaaaccgacgaagattcctagggacagaggtgttattaagacttatatctgaggcacaaatacaggagtttggtgtaaatttttctgtgatgtccagtgaaaaaatgcaagctcgctcacagtcacgtgagcgaggtgaccattcccatttatttgactcaaaagacccaccaatatactcagttggtgcttttgaaaactttagacatcagctagaggacttgaggcaactggataacttcaagcatccccagagggatttccggcagcctgacaggcaccctccagaagacttccgacactcctcagaggactttaggttccccccggaggacttcaggcactccccagaggacttcaggcgacctagggaggaagacttcaggcggccttctgaggaggacttcaggcgcccttgggaggaagatttcaggcgccctccggaggatgacttcaggcaccctagggaggaggactggaggagaccacctccagagcattttaggcggcctcccccagagcacttccggcggccacccccagagcacttcaggcggccacccccagagcatttcaggcgcccgcccccggagcacttccggagaccgccccaggagcatttcaggcggccgcctcaggagcatttcaggcgctcccgagaggaagatttcaggcacccaccagatgaagacttcaggggccctcctgatgaagactttaggcaccctcctgatgaggacttcaggagcccccaggaggaagattttagatgcccttctgatgaggacttcaggcagctcccagaggaagaccttagggaagctccggaggaggaccctagacttcctgacaattttagacctcctggtgaggattttaggagcccgcctgatgattttagaagtcaccgcccttttgtgaattttggtcgcccagaaggtggcaagtttgattttggaaagcataatatgggaagttttcctgaggggagatttatgcctgatccaaaaataaattgtggttcaggtagagtaactcctattaagataatgaatcttccatttaaagctaatgtgaatgaaattttagactttttccatggttacagaatcatacctgattcagtttcgatacagtataatgagcaaggcttacctacaggggaagccattgttgctatgataaactataatgaagctatggctgctattaaagatctaaatgataggccagttgggccccgaaaagttaagttaactttgctgtagagagagagcatttctaaattcagttatcttccttgcagtattgatggagtaaaatacatttgttttaaaaaagtgttttttttttaaattatctaatgaaatattttatttttgacctgtgaatagaacaaatgtaaatagtagaatgtgaatctggttttcttttgcttgcaaattgccattctttttttttttcaaatttaaaattacacatgctgtttttttctttgatggggagaaagaactcattccctgagttcattcatttttgttgatgtcatcggtaatcttcaagacttattgaagtagagttgtatttggggaagatacattttatattcacttttttttttctttctgtagtctacctcttttactcaaactgtataaggaaatagtgactgattgttcaggtttggcattttcattgctacctgcctgcagaattaatgccctcttccttgtctaagatattactgtgttaagtgtcctgttaattataaatagttcaaaatggacagactgtcaacttgaaatttacttatgtaaaaagcttaggtgattcttagggtttccatgttcataactttacaaagctttataaaaataaaattgcaacttaatagagctaattaacttgtatttgtataaaaagaaaaaagaattgcagctcgatattgtgaagtttttcaataacttcattaaaccatatttatgatgggagggaccagacattctatagtaataatgtatagtgctgtgtataattccatggtttcttcaacatcttatcaaccaagtaaaattaatacaagatacgcaaaagatagtaaaataagaatctaattataggtgcaaggggactcaggcttatgctggaagaatctgacaagtggtatagtttgtttttctaggaagaatttactgatgagtcacataacttgcatgtaatattaggttctcattttttagcttcgaaactgtgtccatgcaaagactctataactgttaagacttgtgtggttgaattttgacttctttgatattcagcatttagtgcatacattttgcaactagggaatttgattttctatacccacaataatatttatggctaacatttattaggcacttactatgtgctaggcactgtaagcactttacatgcataatctcggtattccctgtgagtacagggttaattatttacctctatttcacaaatgagataatgaagtgggatgaagtgcgaggttaagcaacttgcttgaagtcataggtagtaaatcgtggggccaattttaacccagacagaccactgactccagttcatgcttttgctgcctcacttttttaagtggtatttttaattaggaagaccatgctaaagatactttcaaggataaatgattattttctcacttcaattgttggtttaaaattagcataaataggtaaaaccagcatgctcaaacactgagctcaaacattaacattactaataaaaaaaaaaagagtgactttaaaagtttctttctatccagggtttctcttgggatactcatatggtatattactggcttatatttcaaaattattttattcaacatgattgactttggccttttataatttacataaaacataattttcctcagttctgtaatccagattttccccattgagtaaataatacaattaaatttacatatggtaatttagacatttaataggatattgcataggtagaatactttgtcagtacttagttactacctatatgtatttttgtgttacttttcagtgatttaaagaaatctaacagaaatctgcttaaatttgttttaaatagtgaatatcctgcttgctatggaatgaataaacaggtaaatttgatatgaaaaagcacctcagtatgattctttaaagtataagcttgtaagtagctaggataatgttaaattgattgtttggaatatccaaaccaagcacaatgaagaaagtagaaatgatatttttaattgagcaaagattgtatagatggttcatttggtcacccattttgaataatatatggaaagttaaaaaatgcttctcagatacaaaggaataaagctaagatgaagcttaacgtgagggattacttactgtggaattgcatttcaaactgggctgaggtgggatggtggtggtagataagaggccagctagagtaaacataagctttgtagttttattattttaagagtcagagtcttgttctgctggccaggctggagtgcagtggtctgataatggttcactgcagcttctaactcctgggctcaagctgtcttcctgcctcagcctcctgagagctgggactacaggtgtgtgccaccttgtctggctaaattttttattatttgtagagacagagtctcactgtgttgcccaggctgttctcaaatttctggcctcaagcaatcctcactccttggtctcccagaatgtgttgggattacaggtgtgagccactgtgcccagccttgtattttgatttttaaattaatttatatgaatatttccttttaccctataatgtatcagggcttaatatttttaaacttcattataaaaagttgattacagaaagtggtatcttctagttgggagccatctttgcacatctctctccaactctgcctttagtgatatgtcaataacaaattggccatggcaggagtattttacaccatggaaagtgataaatgcagcaaatcaaggaattcccctcctgttgtcccctcagaaagccagcttcccagcacctcatcaatttcaaatataaaaaaagaatagtaaattttcatgtacacatcactcagcttcagtaattgtcgtctcatagccagtttttcctctcctatcctcaaggtataccaggtacactggaggtgtattctctagcctgatacccagtggcatttgtcttaaagccaaacatttttgtctagaaattatctaaaaaaatgtagatcatgtctagaaagtcaatcccacaaccaagagataggtaaaaatcatgttaggagtgcatttctattaatttactgagatcactgttaagagcagtgattcttgatccatatatcacctgtt

SEQ ID NO: 4373 - DNA, 615 bp, Homo sapiens
  source 1..615: mol_type = genomic DNA
ccgactcttcctttcccgtcagcttccatgtggtggtgtatgtgcgcttcccagggatcttgagagtgaagatctcgaaggatttcatagttaagttgcttttacagagttaacaggtctccaagaaattttaaaaaaggtcattattgctgtggtttgagctcagcatggctgtagtcatccgtttactggggcttccttttattgcggggcctgtggatattcgtcacttcttcacgggattgactattcctgatggaggagtgcatataattggaggggaaattggggaggcttttattatttttgcaacagatgaagatgcaagacgtgccataagtcgttcaggagggtttatcaaggattcatctgtagagctctttcttagtagcaaggcagaaatgcagaagactatagaaatgaaaagaactgatcgtgtaggaagagggcgtccaggatctgggacatcaggggttgacagcctgtctaattttattgagtctgttaaggaagaagcaagtaattctggatatggctcttcaattaatcaagatgctgggtttcatactaatggtacaggacatggtaatttaaggccaagaaagacaaggccat

SEQ ID NO: 4374 - DNA, 2828 bp, Homo sapiens
  source 1..2828: mol_type = genomic DNA
attggctaggccagggcgcctgcgcggcggggttctcggtcgccagccattcctgaggaggactgccggtcgttcggacgtcttgcctgtcgctggaggagaggtccgggctctccaggaaggtggctgcggcgacaaaatgaagatattcgtgggcaacgtcgacggggcggatacgactccggaggagctggcagccctctttgcgccctacggcacggtcatgagctgcgccgtcatgaaacagttcgccttcgtgcacatgcgcgagaacgcgggcgcgctgcgcgccatcgaagccctgcacggccacgagctgcggccggggcgcgcgctcgtggtggagatgtcgcgcccaaggcctcttaatacttggaagattttcgtgggcaatgtgtcggctgcatgcacgagccaggaactgcgcagcctcttcgagcgccgcggacgcgtcatcgagtgtgacgtggtgaaagactacgcgtttgttcacatggagaaggaagcagatgccaaagccgcaatcgcgcagctcaacggcaaagaagtgaagggcaagcgcatcaacgtggaactctccaccaagggtcagaagaaggggcctggcctggctgtccagtctggggacaagaccaagaaaccaggggctggggatacggccttccctggaactggtggcttctctgccaccttcgactaccagcaggcttttggcaacagcactggtggctttgatgggcaagcccgtcagcccacaccacccttctttggtcgcgaccgcagccctctgcgccgttcacctccccgagcctcttatgtggctcctctgacggcccagccagctacctaccgggcccagccgtccgtgtcactgggagctgcctacagggcccagccttctgcctctttgggtgttggctatcggactcagcccatgacagcccaggcagcctcttaccgcgctcagccctctgtctcccttggggcaccatacaggggccagctggctagtcctagctcccagtctgctgcagcttcttcactcggcccatatggtggagcccagccctcagcctcggccctttcctcctatgggggtcaggcagctgcagcttcttcgctcaactcctatggggctcagggttcctcccttgcctcctatggtaaccagccatcctcttacggcgcccaggctgcctcttcctatggggttcgtgcagctgcttcttcctacaacacccagggagcagcttcctccttaggctcctacggggctcaggcagcctcctatggggcccagtctgcagcctcctcactagcttatggagcccaggcagcttcatataatgcccagccctcggcctcttacaatgcccagtctgccccatatgctgcacagcaggctgcttcctactcttcccaacctgctgcctatgtggcacagccagccacagctgctgcctatgccagccagccagcagcctacgccgcacaagccactaccccaatggctggctcctatggggcccagccggttgtgcagacccagctgaatagttacggggcccaagcatcaatgggcctttcaggctcctatggggctcagtcggctgctgcggccactggctcctatggtgccgcagcagcctacggggcccaaccttctgccaccctggcagctccttaccgcactcagtcatcagcctcattggctgcttcctatgctgcccagcagcatccccaggctgctgcctcctaccgcggccagccaggcaatgcctacgatggggcaggtcagccgtctgcagcctacctgtccatgtcccagggggccgttgccaacgccaacagcaccccgccgccctatgagcgtacccgcctctccccaccccgggccagctacgacgatccctacaaaaaggctgtcgccatgtcgaaaaggtatggttccgaccggcgtttagccgagctctctgattaccgccgtttatcagagtcgcagctttcgttccgccgctcgccgacaaagtcctcgctggattaccgtcgcctgcccgatgcccattccgattacgcacgctattcgggctcctataatgattacctgcgggcggctcagatgcactctggctaccagcgccgcatgtagggccatcctgggatggggcaccacagggagggagggagaaaagaggtgggtagggttacagatccaggttataactactctggcccatacctttcctggttgtggtttttcatgccctctaccatgtgggccttccccaggagatgatcctgttaagtgttcggcagtaacctactttgttccttcgcctcagcagcaaatcttgctactggctctagatctgcggtttcccctctaccctgcctcccgtctccccagaatgggaatttcttttatgtttttatttttttcctggctcccttttatttttgtgcgcgatatttaaggtcgtctggatggggaagcaacctgcagctgaggtcgccggcgcctttttctttttagatgggaaggaggccaggaaagggtcagcttaaccatttcctatgtgccaagctgtgccagcagtccagggtaccctgactgtccctctgtagactgttgagactgagttcctgttgggacagtcagttggtatgtatccaagtccctgctgaccactaatgttctagctgatggtgagcggcacagtcccacttccccatctccccaagtaggtggtgttagaaaaccttaattttttttcccttttgtatggactacaaataaaacttggggcaatttgcagtttggaaacctg

SEQ ID NO: 4375 - DNA, 4244 bp, Homo sapiens
  source 1..4244: mol_type = genomic DNA
gcgcgcggggggcggggctccccccggctgttcactcagctaccacagcgacgtaaaatggtgtccgctaggcgtcccaggacggcttcctgagggactggagggccccgacagccggaaagcctgccccgccccttggccggcacaggtacgacggcggggagctcagaagtttcgaactccaagggccgaagcacagccaaacaccccacggaacttaacaaatgtttgtggggagaacgccgaaaacgcggggaggcggggctggcgcacagtcaccctctcgcgacatctaagtgacgtcgcacagcaagcacgtgttctagtctttcaccttcagtcagcctcctccgttatacaggcctacccctttaagcgagtgatggacagttatttcagcctatcaacttccttgccgacatccaatcagatttaaacttcttttagccgccggaggagttggaaaaagggggtcgaaagagggagcttaccgtctctcgcgatatcgctgtgagcctgcctctctggaaaaaacgccgaaactgatggcccgacctcccaaatagtggtttaaaggacgggtttataagccaatgaaagggataaggaggtgggttgctgctgtcactgagcaagaagtaccgttacagggcagactttttgtccaatcaacacctcaacactttgggtcacgtgaccgcagagtgcgaggggcggagctacagtctggcgcgaggaaccgttaagatagacaacaaatgtaaccaatgaggtactccgactagggggttgggaacccaataacagtggttgggcgggcgccttcctggagcgcggggagatgtaaagatagacaaataattttcccaatgagactgtagaagagagagcaattggccaatgaggactgcggggcgggaccctgtgccgcggcggagtccaagatggcggcgtgcggttccgctgtgtgaaacgagcgcggggcggcgggttactcagctccgcggagacgacctccgacgacccgcaacaatgaagggaaaagagcgctcgccagtgaaggccaaacgctcccgtggtggtgaggactcgacttcccgcggtgagcggagcaagaagttagggggctctggtggcagcaatgggagcagcagcggaaagaccgatagcggcggtgggtcgcggcggagtctccacctggacaagtccagcagtcgaggtggcagccgcgagtatgataccggtgggggcagctccagtagccgcttgcatagttatagctccccgagcaccaaaaattcttcgggcgggggcgaatcgcgcagcagctcccggggtggaggcggggagtcacgttcctctggggccgcctcctcagctcccggcggcggggacggcgcggaatacaagactctgaagataagcgagttggggtcccagcttagtgacgaagcggtggaggacggcctgtttcatgagttcaaacgcttcggtgatgtaagtgtgaaaatcagtcatctgtcgggttctggcagcggggatgagcgggtagcctttgtgaacttccggcggccagaggacgcgcgggcggccaagcatgccagaggccgcctggtgctctatgaccggcctctgaagatagaagctgtgtatgtgagccggcgccgcagccgctcccctttagacaaagatacttatcctccatcagccagtgtggtcggggcctctgtaggtggtcaccggcacccccctggaggtggtggaggccagagatcactttcccctggtggcgctgctttgggatacagagactaccggctgcagcagttggctcttggccgcctgccccctccacctccgccaccattgcctcgagacctggagagagaaagagactacccgttctatgagagagtgcgccctgcatacagtcttgagccaagggtgggagctggagcaggtgctgctcctttcagagaagtggatgagatttcacccgaggatgatcagcgagctaaccggacgctcttcttgggcaacctagacatcactgtaacggagagtgatttaagaagggcgtttgatcgctttggagtcatcacagaagtagatatcaagaggccttctcgcggccagactagtacttacggctttctcaaatttgagaacttagatatgtctcaccgggccaaattagcaatgtctggcaaaattataattcggaatcctatcaaaattggttatggtaaagctacacccaccacccgcctctgggtgggaggcctgggaccttgggttcctcttgctgccctggcacgagaatttgatcgatttggcaccatacgcaccatagactaccgaaaaggtgatagttgggcatatatccagtatgaaagcctggatgcagcgcatgctgcctggacccatatgcggggcttcccacttggtggcccagatcgacgccttagagtagactttgccgacaccgaacatcgttaccagcagcagtatctgcagcctctgcccttgactcattatgagctggtgacagatgcttttggacatcgggcaccagaccctttgaggggtgctcgggataggacaccacccttactatacagagatcgtgatagggacctttatcctgactctgattgggtgccacccccacccccagtccgagaacgcagcactcggactgcagctacttctgtgcctgcttacgagccactggatagcctagatcgcaggcgggatggttggtccttggaccgggacagaggtgatcgagatctgcccagcagcagagaccagcctaggaagcgaaggctgcctgaggagagtggaggacgtcatctggataggtctcctgagagtgaccgcccacgaaaacgtcactgcgctccttctcctgaccgcagtccagaattgagcagtagccgggatcgttacaacagcgacaatgatcgatcttcccgtcttctcttggaaaggccctctccaatcagagacagacgaggtagtttggagaagagccagggtgacaagcgagaccgtaaaaactctgcatcagctgaacgagataggaagcaccggacaactgctcccactgagggaaaaagccctctgaaaaaagaagaccgctctgatgggagtgcacctagcaccagcactgcttcctccaagctgaagtccccgtcccagaaacaggatggggggacagcccctgtggcatcagcctctcccaaactctgtttggcctggcagggcatgcttctactgaagaacagcaactttccttccaacatgcatctgttgcagggtgacctccaagtggctagtagtcttcttgtggagggttcaactggaggcaaagtggcccagctcaagatcactcagcgtctccgtttggaccagcccaagttggatgaagtaactcgacgcatcaaagtagcagggcccaatggttatgccattcttttggctgtgcctggaagttctgacagccggtcctcctcttcctcagctgcatcagacactgccacttctactcagaggccacttaggaaccttgtgtcctatttaaagcaaaagcaggcagccggggtgatcagcctccctgtggggggcaacaaagacaaggaaaacaccggggtccttcatgccttcccaccttgtgagttctcccagcagttcctggattcccctgccaaggcactggccaaatctgaagaagattacctggtcatgatcattgtccgtgggtttggttttcagataggagttaggtatgagaacaagaagagagaaaacttggcgctgaccctgttatagtggttatagtggtgtccctaaagggaggaaatgatttcagcaaaactggttgaacagcggatgaagatatggaattcaaagctctaatggacctttttgaagagaagttgtggcttatgtggagtttacatgggcctctgatggaagaaagctaatctgtttagtatttgtgcattttactaaaatggcagcttaaagttgtgtatctgctattgtgatgccaatgccggtgttttaagtggaaaaaaaatgacctctttgatttgtgctgtgtacacaagatttctggaaaagtaaagaaaaaccctttttatggctcacacagcttaagagtagctgtctctcaaacgtgcgctcacagttgagctgcttttgttttattctaaataaattgtttcttttgaggaaaa

SEQ ID NO: 4376 - DNA, 6600 bp, Homo sapiens
  source 1..6600: mol_type = genomic DNA
gtccaagatggcggcgccgggggcgctgcctcctcggccgccgcctccgccgccgccgctgtgagaaacctacgggccgcccgcccgccgcgccagcgccatgaagcggcagagcgagcgagactctagcccgagcgggcgcggctcgtcatcgtccgccaagcgtccgcgggagcgcgaacgggaggcggaggcgggcgggcggcgggcggcgcacaaggcctctggcggcgccaagcacccggttccagcgcgggcccgcgacaaaccccgcggcagcggaagcggcgggggcgggcatcgcgacggccgcggcaccggggacgcgaatcaccgcgcgagtagcgggcgctcctcgggctccggcgctggcggcgggggacgcggcggcaaggcctcgggggacccgggcgcctccggcatgtcgccccgcgcgtctcctctgccgccgcctccgccaccgcctggggccgagcccgcgtgtcccggctcatccgcggccgcgcctgagtacaagacgttgctcatcagcagcttgagccccgcgctgcccgccgagcacctcgaggaccggctcttccaccagttcaagcgcttcggcgagatcagcctccgcctgtcgcacacgcctgagctgggccgtgtggcctacgtgaatttccggcacccacaggacgcacgcgaggcccgccagcacgccctggcccggcagctgctgctctacgaccgcccgctcaaggtagagcccgtgtacctgcgtggcggcggcgggagcagtcggcgaagtagcagcagcagcgccgccgcttccacgcctcccccagggccgcccgcgcccgccgacccgctcggctacctcccgctacacggaggctaccagtacaagcagcgctcgctgtcccccgtcgctgccccgcccctgcgggagccccgtgcccgtcacgccgccgcagccttcgccctggatgccgctgctgccgccgccgtgggactgtcccgggagcgggccctggactactacgggctgtacgacgaccgtgggcgcccctatggctacccagctgtgtgtgaggaggacctgatgcccgaggatgaccagcgggccacgcgcaacctcttcattggtaacctggaccacagcgtatctgaggtggagctgcgaagggccttcgagaaatatggcatcatcgaggaggtggtcatcaagaggcctgcccgtggccagggcggtgcctatgccttcctcaagttccagaacctggacatggcccatagggctaaggtggccatgtcgggccgagtgattggtcgcaaccccattaagataggctatggcaaggccaaccccaccactcgtctctgggtgggtggcctgggacctaacacgtcactggcggctctggcccgagagtttgaccgctttgggagcattcggaccattgatcacgtcaaaggagatagctttgcctatattcagtacgagagcttggacgcagcccaggccgcctgtgctaaaatgaggggttttcccttgggtggaccagaccgcaggctccgcgtggattttgccaaagcagaggagactcggtacccccagcagtaccagccctcgccactccctgtgcattatgagctgctcacagatggatacacccggcaccgcaacctggacgccgacctggtgcgggacaggacgcccccacaccttctgtactcagaccgagaccggacttttttggaaggggactggaccagccccagtaaaagctctgaccgccgaaacagccttgagggctacagtcgctcagtgcgcagccggagtggtgagcgttggggggcagatggagaccgtggtttgcccaagccctgggaagagaggcggaaacggagaagcctttccagtgaccgtgggaggacaacccattcaccatatgaggaacggagtaggaccaagggcagtgggcagcagtcagagcggggctccgaccgcacccctgagcgcagccgcaaggagaaccactccagtgaagggaccaaggagtccagcagcaactccctcagcaacagcagacatggggctgaggaacggggccaccaccaccaccaccacgaggctgcagactcttcccacgggaagaaggcaagagacagcgagcgcaatcaccggaccacagaggccgagcccaagcctctggaagagccaaaacacgagaccaaaaagctgaagaatctttcagagtacgctcagacactacagctgggttggaatgggcttctggtgttgaaaaacagctgcttccccacgtctatgcatatcctagagggggaccagggggtgatcagcagtctcctcaaagaccacacttctgggagcaagctgacccagctgaagatcgcccagcgccttcgactggaccagcccaagcttgacgaggtcacacgacgcatcaagcaggggagccccaacggctatgcggtcctcttagccacccaggcaacccccagtgggcttggcactgaggggatgcccacagtagagcccggtctgcagaggcggcttctcaggaacctggtctcctacttgaaacagaagcaggccgcaggggtgatcagcttgccagtgggggggtccaagggcagagacggcacaggcatgctctacgccttcccaccctgcgacttttcccagcagtacctccagtcagcactaaggacattgggcaagctagaagaagaacacatggtgatagtcatcgtcagagacactgcctagcccaagcctgtctttcccagcgtcatgtttgtgtcacaaaagcagttattttaaaatctgatcccctctctaccctaccactttggtttgaattatctcctgggttattttggttcatttgggtggggatcaaagtcctgtccaccaccaaaactaagttcttagattttgggggatttttttttttaaacgatgagaagggaatccggttatgttgatttctagtgtacaagatactgtctgctgtggttctgtatttttttattttttgaccaactgtatggaaagttgtcagtaaaacctttgacagaggatggatttttaaacctgttcagagtcctggtttaatcaatcaagctaaaagaatcgaagacatccctagtgcatgtacacgaatgccctacgtcatccttccagcaccactgctgcatgggtcactctcggcctctcaattcttcaggctcagtctggactctacttacactcatttttatcttggctgacagcaggcaagcttcagtttgggctgtggacgctgccacacaagcctgagtagagcccatgcaaaggaagggatggggtgagcgcaaggcctgtggtcagcagctactgatggttttttctgccttaaaccgtgtgtgtgtccatcatcatcagtttgagctgtggctgtttgtttgggacagagtgcccactcagcatgtttggcagcaggtagccttcagcagctgtgtagtcttgtacaaggagaagctgtgcactgttgatgccagggggtctcggggcccctgatctgtccaggctcctggttcggcctactttctagcctcactcagcccagggatagccagtgttgggagacagagttgcctcaggttcccaggggcccgggagtccaaatactggaatggagggttggaggcagccttccttggatttactcatgaactttgcctagttgtttgtgatttttggctttctctggtcgttcaggggtgatgggtaatagagcaggcccgtgtccagtcatacctagagatttgtggggggatactgaacctctagactgaagtacttaccggggagcacagtggactaggggatgcccttgataatgacggtttcctaggtgcaagatcagagcatgtgcctacaccttgtgccctgatgccgaggtggagaccattgggaaataattaatagatatttttctggggggaaatcacaagtcactgaggtgtttgtttgtttgttaggcagtgctagagcttgaagccactcaagccagttggggaggaaagggatgcggaggtaccctctagctgggaagaagggtgagattccgtcttcttccctgtctcaagtaagtaaggaaggtactgcggacagtgtgggccagggaggaaaaccagagcacacagttttgtcaccatggaacaccccaaatgccattcttcagcgtgtctggtaccttggatgttcaaacagggaacactgtcagggctgaggagaacagaagctctggtaagcgaatgagcccctagatgataaccaggaactccaggttctgctggccgtggcatcctctctccaggtctgctcccttaccggagctaggataaggtagcatgagtgacacctgagattagaggctggggctcactgcaggctgtggagaggtcatgctggtccacaggaacacttggcagtgctctcgtagacccctcggtgatgtggaatggacaggtgcctcgcaagagagcaagcacgttcataacaaaacagcaacacaaagacatgttaagcatgtttatttatttgcctgtttttgtttttttacttgagctgtggtcacagctgccaggtacctaagcaagtcagttgggtacagcaggacacgccaccattccagggtagctggtaccgccagaaacaggagtgggtcttgtcctgttgcaggcacactgcagtggttttcctgcagctctccaacaaacgcctgagtcacaggccagagctgccttggtatgttgttaagtccaaaacttcttctctgggctacctatcttccttcatgaagcaggtgctcaggacccggaagaatcatctacctcccagctttgtgagacagaaccaagtaaaaggaaacatgctagaaaacgtgcctagagaagacacttcaacctttgccttatccaacccctcttcagagaaaggtgtcccatggccccaaaaagaactgccaagttttggtgaggagtaacaccctggcatgacattccttctctttcctggccctcaaccacttccttcctttggctcttaagacctagcaggttctgtgaactctcaggccttggccagcactagttaggggaggtcaggtggtcaatgtcctggtgattttatgagactgccccactgagaaaacttacttacttcaggcatccagtgcccccacccagggttcaggccctgtctaaggtgttgcttaaagacaaaaaggcaacatgtgcctcactggtggtgtgccactgttctcatgctgcctcctaagtgactccgattttcagccctggtagaataaggaagacagctgatgcctccttagccccttagcacatgttcctaaggtgtgttgtcaagccaacctgaattctgcctccctgttatagtccctgtctcccccacagagacctgtgggtgctcccagcagagttgagactggctccgttgagttaatgactagaatatagtgctttcactacttgattgttaacctgttttcttctgatgccatcagtaccagcagtcagactattccactggttaagtgtttactaccattaaagcgaggcatgaagcaaagagctgagtgagtcctctgctctccagaggaccaagaaatacctgtgtgacacagacccacttcagtgtgtacagcaaattctatagtgcttctgagcccagcagggctttacctgcccctggagagttttagccgtcttgtgtttcttgtttacttcacaaccaaatttgtcccctcttctctctgttaagggagagaagtcactttagctggataatacctatgtaacaaactgagcagctgttatttgggcaaaatcaaaggaagaaagagactatggtcttctatttattgtgggaaggaaaacagggtggggcgggtgagtgaaaaggtggaaatccctggtaccttgcctggtggttacacagtttaaccataggccaattttaggggcctctgaagtatctttctacaaacgcagacaagctccactacccctaacctgccaggatgctcaagtccactgtcacaatccctttcagaaaacattagtggccgctgccccagctacagagacggccgaaatgctttcactccttagctttgccaactccatcctccaaaacttcccagaatacctccctttccagttctaccaaatctgtacttgggagcagcctgctggatccagaacatgacaacagagagctgcgtccacagggaacaaagccctgacctctctctccacattacccttacaaaaacaggccctccccatgagagagctacacggcaggggcagacactgtgagtataagctactttcctccctggagtgctctatgtgggcagaacatgctctccttgcctctcctggaaggtgtcttctctatggcctggctagagctgcaaaaaagggacacaccccacttcggtaaaagaaaatagggaaaggccataaacaaagacagacttgtagtttattttgtattttttttaaataaatacactttacatt

SEQ ID NO: 4377 - DNA, 1669 bp, Homo sapiens
  source 1..1669: mol_type = genomic DNA
gagcattcggaccattgatcacgtcaaaggagatagctttgcctatattcagtacgagagcttggacgcagcccaggccgcctgtgctaaaatgaggggttttcccttgggtggaccagaccgcaggctccgcgtggattttgccaaagcagaggagactcggtacccccagcagtaccagccctcgccactccctgtgcattatgagctgctcacagatggatacacccggcaccgcaacctggacgccgacctggtgcgggacaggacgcccccacaccttctgtactcagaccgagaccggacttttttggaaggggactggaccagccccagtaaaagctctgaccgccgaaacagccttgagggctacagtcgctcagtgcgcagccggagtggtgagcgttggggggcagatggagaccgtggtttgcccaccctgggaagagaggcggaaacggagaagcctttccagtgaccgtgggaggacaacccattcaccatatgaggaacggagtaggaccaagggcagtgggcagcagtcagagcggggctccgaccgcacccctgagcgcagccgcaaggagaaccactccagtgaagggaccaaggagtccagcagcaactccctcagcaacagcagacatggggctgaggaacggggccaccaccaccaccaccacgaggctgcagactcttcccacgggaagaaggcaagagacagcgagcgcaatcaccggaccacagaggccgagcccaagcctctggaagagccaaaacacgagaccaaaaagctgaagaatctttcagagtacgctcagacactacagctgggttggaatgggcttctggtgttgaaaaacagctgcttccccacgtctatgcatatcctagagggggaccagggggtgatcagcagtctcctcaaagaccacacttctgggagcaagctgacccagctgaagatcgcccagcgccttcgactggaccagcccaagcttgacgaggtcacacgacgcatcaagcaggggagccccaacggctatgcggtcctcttagccacccaggcaacccccagtgggcttggcactgaggggatgcccacagtagagcccggtctgcagaggcggcttctcaggaacctggtctcctacttgaaacagaagcaggccgcaggggtgatcagcttgccagtgggggggtccaagggcagagacggcacaggcatgctctacgccttcccaccctgcgacttttcccagcagtacctccagtcagcactaaggacattgggcaagctagaagaagaacacatggtgatagtcatcgtcagagacactgcctagcccaagcctgtctttcccagcgtcatgtttgtgtcacaaaagcagttattttaaaatctgatcccctctctaccctaccactttggtttgaattatctcctgggttattttggttcatttgggtggggatcaaagtcctgtccaccaccaaaactaagttcttagattttgggggatttttttttttaaacgatgagaagggaatccggttatgttgatttctagtgtacaagatactgtctgctgtggttctgtatttttttattttttgaccaactgtatggaaagttgtcagtaaaacctttgacagaggatggattttt

SEQ ID NO: 4378 - DNA, 2446 bp, Homo sapiens
  source 1..2446: mol_type = genomic DNA
gccgccgctgtgagaaacctacgggccgcccgcccgccgcgccagcgccatgaagcggcagagcgagcgagactctagcccgccgacccgctcggctacctcccgctacacggaggctaccagtacaagcagcgctcgctgtcccccgtcgctgccccgcccctgcgggagccccgtgcccgtcacgccgccgcagccttcgccctggatgccgctgctgccgccgccgtgggactgtcccgggagcgggccctggactactacgggctgtacgacgaccgtgggcgcccctatggctacccagctgtgtgtgaggaggacctgatgcccgaggatgaccagcgggccacgcgcaacctcttcattggtaacctggaccacagcgtatctgaggtggagctgcgaagggccttcgagaaatatggcatcatcgaggaggtggtcatcaagaggcctgcccgtggccagggcggtgcctatgccttcctcaagttccagaacctggacatggcccatagggctaaggtggccatgtcgggccgagtgattggtcgcaaccccattaagataggctatggcaaggccaaccccaccactcgtctctgggtgggtggcctgggacctaacacgtcactggcggctctggcccgagagtttgaccgctttgggagcattcggaccattgatcacgtcaaaggagatagctttgcctatattcagtacgagagcttggacgcagcccaggccgcctgtgctaaaatgaggggttttcccttgggtggaccagaccgcaggctccgcgtggattttgccaaagcagaggagactcggtacccccagcagtaccagccctcgccactccctgtgcattatgagctgctcacagatggatacacccggcaccgcaacctggacgccgacctggtgcgggacaggacgcccccacaccttctgtactcagaccgagaccggacttttttggaaggggactggaccagccccagtaaaagctctgaccgccgaaacagccttgagggctacagtcgctcagtgcgcagccggagtggtgagcgttggggggcagatggagaccgtggtttgcccaagccctgggaagagaggcggaaacggagaagcctttccagtgaccgtgggaggacaacccattcaccatatgaggaacggagtaggaccaagggcagtgggcagcagtcagagcggggctccgaccgcacccctgagcgcagccgcaaggagaaccactccagtgaagggaccaaggagtccagcagcaactccctcagcaacagcagacatggggctgaggaacggggccaccaccaccaccaccacgaggctgcagactcttcccacgggaagaaggcaagagacagcgagcgcaatcaccggaccacagaggccgagcccaagcctctggaagagccaaaacacgagaccaaaaagctgaagaatctttcagagtacgctcagacactacagctgggttggaatgggcttctggtgttgaaaaacagctgcttccccacgtctatgcatatcctagagggggaccagggggtgatcagcagtctcctcaaagaccacacttctgggagcaagctgacccagctgaagatcgcccagcgccttcgactggaccagcccaagcttgacgaggtcacacgacgcatcaagcaggggagccccaacggctatgcggtcctcttagccacccaggcaacccccagtgggcttggcactgaggggatgcccacagtagagcccggtctgcagaggcggcttctcaggaacctggtctcctacttgaaacagaagcaggccgcaggggtgatcagcttgccagtgggggggtccaagggcagagacggcacaggcatgctctacgccttcccaccctgcgacttttcccagcagtacctccagtcagcactaaggacattgggcaagctagaagaagaacacatggtgatagtcatcgtcagagacactgcctagcccaagcctgtctttcccagcgtcatgtttgtgtcacaaaagcagttattttaaaatctgatcccctctctaccctaccactttggtttgaattatctcctgggttattttggttcatttgggtggggatcaaagtcctgtccaccaccaaaactaagttcttagattttgggggatttttttttttaaacgatgagaagggaatccggttatgttgatttctagtgtacaagatactgtctgctgtggttctgtatttttttattttttgaccaactgtatggaaagttgtcagtaaaacctttgacagaggatggatttttaaacctgttcagagtcctggtttaatcaatcaagctaaaagaatcgaagacatccctagtgcatgtacacgaatgccctacgtcatccttccagcaccactgctgca

SEQ ID NO: 4379 - DNA, 1116 bp, Homo sapiens
  source 1..1116: mol_type = genomic DNA
cgccgccgctgtgagaaacctacgggccgcccgcccgccgcgccagcgccatgaagcggcaaagcgagcgcaatcaccggaccacagaggccgagcccaagcctctggaagagccaaaacacgagaccaaaaagctgaagaatctttcagagtacgctcagacactacagctgggttggaatgggcttctggtgttgaaaaacagctgcttccccacgtctatgcatatcctagagggggaccagggggtgatcagcagtctcctcaaagaccacacttctgggagcaagctgacccagctgaagatcgcccagcgccttcgactggaccagcccaagcttgacgaggtcacacgacgcatcaagcaggggagccccaacggctatgcggtcctcttagccacccaggcaacccccagtgggcttggcactgaggggatgcccacagtagagcccggtctgcagaggcggcttctcaggaacctggtctcctacttgaaacagaagcaggccgcaggggtgatcagcttgccagtgggggggtccaagggcagagacggcacaggcatgctctacgccttcccaccctgcgacttttcccagcagtacctccagtcagcactaaggacattgggcaagctagaagaagaacacatggtgatagtcatcgtcagagacactgcctagcccaagcctgtctttcccagcgtcatgtttgtgtcacaaaagcagttattttaaaatctgatcccctctctaccctaccactttggtttgaattatctcctgggttattttggttcatttgggtggggatcaaagtcctgtccaccaccaaaactaagttcttagattttgggggatttttttttttaaacgatgagaagggaatccggttatgttgatttctagtgtacaagatactgtctgctgtggttctgtatttttttattttttgaccaactgtatggaaagttgtcagtaaaacctttgacagaggatggatttttaaacctgttcagagtcctggtttaatcaatcaagctaaaagaatcgaagacatccctagtgcatgtacacgaatgccctacgtcatccttccagcaccactgctgca

SEQ ID NO: 4380 - DNA, 676 bp, Homo sapiens
  source 1..676: mol_type = genomic DNA
ttcccttagctgacgaatatgaccctatgtttcctaatgattatgagaaagtagtgaagcgccaaagagaggaacgacagagacagcgggagctggaaagacaaaaggaaatagaagaaagggaaaaaaggcgtaaagacagacatgaagcaagtgggtttgcaaggagaccagatccagattctgatgaagatgaagattatgagcgagagaggaggaaaagaagtatgggcggagctgccattgccccacccacttctctggtagagaaagacaaagagttaccccgagattttccttatgaagaggactcaagacctcgatcacagtcttccaaagcagccattcctcccccagtgtacgaggaacaagacagaccgagatctccaaccggacctagcaactccttcctcgctaacatggggggcacggtggcgcacaagatcatgcagaagtacggcttccgggagggccagggtctggggaagcatgagcagggcctgagcactgccttgtcagtggagaagaccagcaagcgtggcggcaagatcatcgtgggcgacgccacagagaaaggtgtgtccccagggaagcgtgtgactagagggaaaggactggccccatccatatcagacatggccagtcttgatcctcatgtgtcagcagggggacaatg

SEQ ID NO: 4381 - DNA, 844 bp, Homo sapiens
  source 1..844: mol_type = genomic DNA
gcgccgccgagcgccctgaggactcagcgaagggtgggcgccgccgaggcctcctgccgctggcgggtttccgcggagtgccgcccggctccgctctgccgccggcgcggctcatgggcagagtcggccgggcgggccggagccaaaggacgaaacaaagtacagtcctcgccccagtcattgacctgaagcgaggtggctcctcagatgaccggcaaattgtggacactccaccgcatgtagcagctgggctgaaggatcctgttcccagtgggttttctgcaggggaagttctgattcccttagctgacgaatatgaccctatgtttcctaatgattatgagaaagtagtgaagcgccaaagagaggaacgacagagacagcgggagctggaaagacaaaaggaaatagaagaaagggaaaaaaggcgtaaagacagacatgaagcaagtgggtttgcaaggagaccagatccagattctgatgaagatgaagattatgagcgagagaggaggaaaagaagtatgggcggagctgccattgccccacccacttctctggtagagaaagacaaagagttaccccgagattttccttatgaagaggactcaagacctcgatcacagtcttccaaagcagccattcctcccccagtgtacgaggaacaagacagaccgagatctccaaccggacctagcaactccttcctcgctaacatggggggcacggtggcgcacaagatcatgcagaagtacggcttccgggagggccagggtctggggaagcatgagcagggcctgagcactgccttgtcagtggagaagaccagcaagcgtggcggcaa

SEQ ID NO: 4382 - DNA, 3192 bp, Homo sapiens
  source 1..3192: mol_type = genomic DNA
gcaggcgcaggcgcaggcggggcgcaggcgcgggcgcgctctcccggcagcccgcgctccctgaccccgcgccgccgagcgccctgaggactcagcgaagggtgggcgccgccgaggcctcctgccgctggcgggtttccgcggagtgccgcccggctccgctctgccgccggcgcggctcatgggcagagtcggccgggcgggccggagccaaaggacgaaacaaagtacagtcctcgccccagtcattgacctgaagcgaggtggctcctcagatgaccggcaaattgtggacactccaccgcatgtagcagctgggctgaaggatcctgttcccagtgggttttctgcaggggaagttctgattcccttagctgacgaatatgaccctatgtttcctaatgattatgagaaagtagtgaagcgccaaagagaggaacgacagagacagcgggagctggaaagacaaaaggaaatagaagaaagggaaaaaaggcgtaaagacagacatgaagcaagtgggtttgcaaggagaccagatccagattctgatgaagatgaagattatgagcgagagaggaggaaaagaagtatgggcggagctgccattgccccacccacttctctggtagagaaagacaaagagttaccccgagattttccttatgaagaggactcaagacctcgatcacagtcttccaaagcagccattcctcccccagtgtacgaggaacaagacagaccgagatctccaaccggacctagcaactccttcctcgctaacatggggggcacggtggcgcacaagatcatgcagaagtacggcttccgggagggccagggtctggggaagcatgagcagggcctgagcactgccttgtcagtggagaagaccagcaagcgtggcggcaagatcatcgtgggcgacgccacagagaaagatgcatccaagaagtcagattcaaatccgctgactgaaatacttaagtgtcctactaaagtggtcttactaaggaacatggttggtgcgggagaggtggatgaagacttggaagttgaaaccaaggaagaatgtgaaaaatatggcaaagttggaaaatgtgtgatatttgaaattcctggtgcccctgatgatgaagcagtacggatatttttagaatttgagagagttgaatcagcaattaaagcggttgttgacttgaatgggaggtattttggtggacgggtggtaaaagcatgtttctacaatttggacaaattcagggtcttggatttggcagaacaagtttgattttaagaactagagcacgagtcatctccggtgatccttaaatgaactgcaggctgagaaaagaaggaaaaaggtcacagcctccatggctgttgcataccaagactcttggaaggacttctaagatatatgttgattgatcccttttttattttgtggttttttaatatagtataaaaatccttttaaaaaaacaacaatctgtgtgcctctctggttgtttctcttttttattattactcctgagttgatgacattttttgttagatttcatggtaattctcaagtgcttcaatgatgcagcatttcttgcactaaaaaaaaaaaaaaaaaaaaaactagaaagttttgggacatggggttatattaaattattctttgtttttctttttcttttaataaagcctgcaagttactaaattgtagtttcataaattctgtagtaaagtatcatcttggcagtgtgccaaaggtgaaaatgatgctttctctaacagagaaattcttagtgactccagtcgtagaaaaacgtctttacaacctgaataagattgaagaattgtgaacataccatggcctattggatgaatcatttgccgtaggctaaatcagactgtagggtttgtgatggatttatggagtatgtgggtatagaaatcatgaatctagcatttgttttcagagattcaagcatagtcttaagggtagatcagaaatgacaaatgaattcaaaacctagcaggtgcattgtaaatgtgtgcccagttatgttttggaaatggcagttccttggggtcatgtttctactggcaaaatttgcaatagtgttctattgtatgtaattttaaaatttataagattatccacgttggccaagtaaactgtactgccaatagaattctggaattgtgagaaattgtatcattgaagttcagtaggatgtgtggcttaaaaatttatcaggaccacaaaaaagaaaacaaaaatatttggtactgaggttcattgccagggcaggaggtatttccagaaaatactcatgcctgtgttctgttccttgctttcccaaatactgcatgtgactttcctaagcggcagctgaaagactcgagcccgtgctgtctcctttggttattatgacatgaaagtgtatcaagaactcagcatttctttgcatccatggacttggtttggagacataaggaatattctgaccctttttaaaaaaggattttctcatgtttttatttaacataaataaaagaataacattttatcttttgtggtattattttattgaataaaattgagttttatgataaaagtgcacctgttctgtaaagtaagttggggttaaggaatgtgaggtaaattacataattgaacattgtggaagacagaatcaaaagcagccctggaacttcagttatctatggaattaggcataccattcctcaagtggaaaccatgtttgtgcttacaagtaccggagtgtgcttgtttaattttagaaactaatggttccaacccacctttcatgcatgcatttattgttgttatgctttgtaaaacattgtttgcacctaaatgggtggcttttcctaacattctcatggtcagcaaccagagagttgcaaccaactcatactacttgatttccgttcgcatgaggacagcttggtgtgtgcctttctccccagtcttttatttttaaaataactgtgttaatcagttagtgctttatttataatgaatttctgatagtcgaataatttctaaatctcctgcaagttagtacttgagaaatttgaaattaattttcaatattaacatttaagctaatataaaaattttaaatttcaataaaaattaaaaattatgtaagctacaatgtaactggc

SEQ ID NO: 4383 - DNA, 792 bp, Homo sapiens
  source 1..792: mol_type = genomic DNA
aatggtaccaggagcctgggcctctgttgctgaaaggtcctggaccttttacctctaaaatttcatgatacttattttaacatgaaaagcctttattgaattgtgcattctttaatccccaccccttttgcctttcagcattaaactgaagaaaagatgtccctgtacgatgacctaggagtggagaccagtgactcaaaaacagaaggctggtccaaaaacttcaaacttctgcagtctcagcttcaggtgaagaaggcagctctcactcaggcaaagagccaaaggacgaaacaaagtacagtcctcgccccagtcattgacctgaagcgaggtggctcctcagatgaccggcaaattgtggacactccaccgcatgtagcagctgggctgaaggatcctgttcccagtgggttttctgcaggggaagttctgattcccttagctgacgaatatgaccctatgtttcctaatgattatgagaaagtagtgaagcgccaaagagaggaacgacagagacagcgggagctggaaagacaaaaggaaatagaagaaagggaaaaaaggcgtaaagacagacatgaagcaagtgggtttgcaaggagaccagatccagattctgatgaagatgaagattatgagcgagagaggaggaaaagaagtatgggcggagctgccattgccccacccacttctctggtagagaaagacaaagagttaccccgagattttccttatgaagaggactcaagacctcgatcacagtcttccaaagcagccattcctccccca

SEQ ID NO: 4384 - DNA, 805 bp, Homo sapiens
  source 1..805: mol_type = genomic DNA
gaggactcagcgaagggtgggcgccgccgaggcctcctgccgctggcgggtttccgcggagtgccgcccggctccgctctgccgccggcgcggctcatgggcagagtcggccgggcgggccggcattaaactgaagaaaagatgtccctgtacgatgacctaggagtggagaccagtgactcaaaaacagaaggctggtccaaaaacttcaaacttctgcagtctcagcttcaggtgaagaaggcagctctcactcaggcaaagagccaaaggacgaaacaaagtacagtcctcgccccagtcattgacctgaagcgaggtggctcctcagatgaccggcaaattgtggacactccaccgcatgtagcagctgggctgaaggatcctgttcccagtgggttttctgcaggggaagttctgattcccttagctgacgaatatgaccctatgtttcctaatgattatgagaaagtagtgaagcgccaaagagaggaacgacagagacagcgggagctggaaagacaaaaggaaatagaagaaagggaaaagcgtaaagacagacatgaagcaagtgggtttgcaaggagaccagatccagattctgatgaagatgaagattatgagcgagagaggaggaaaagaagtatgggcggagctgccattgccccacccacttctctggtagagaaagacaaagagttaccccgagattttccttatgaagaggactcaagacctcgatcacagtcttccaaagcagccattcctcccccagtgtacgaggaacaagacagaccgagatctc

SEQ ID NO: 4385 - DNA, 2755 bp, Homo sapiens
  source 1..2755: mol_type = genomic DNA
caggcgcaggcgcaggcggggcgcaggcgcgggcgcgctctcccggcagcccgcgctccctgaccccgcgccgccgagcgccctgaggactcagcgaagggtgggcgccgccgaggcctcctgccgctggcgggtttccgcggagtgccgcccggctccgctctgccgccggcgcggctcatgggcagagtcggccgggcgggccggcattaaactgaagaaaagatgtccctgtacgatgacctaggagtggagaccagtgactcaaaaacagaaggctggtccaaaaacttcaaacttctgcagtctcagcttcaggtgaagaaggcagctctcactcaggcaaagagccaaaggacgaaacaaagtacagtcctcgccccagtcattgacctgaagcgaggtggctcctcagatgaccggcaaattgtggacactccaccgcatgtagcagctgggctgaaggatcctgttcccagtgggttttctgcaggggaagttctgattcccttagctgacgaatatgaccctatgtttcctaatgattatgagaaagtagtgaagcgccaaagagaggaacgacagagacagcgggagctggaaagacaaaaggaaatagaagaaagggaaaaaaggcgtaaagacagacatgaagcaagtgggtttgcaaggagaccagatccagattctgatgaagatgaagattatgagcgagagaggaggaaaagaagtatgggcggagctgccattgccccacccacttctctggtagagaaagacaaagagttaccccgagattttccttatgaagaggactcaagacctcgatcacagtcttccaaagcagccattcctcccccagtgtacgaggaacaagacagaccgagatctccaaccggacctagcaactccttcctcgctaacatggggggcacggtggcgcacaagatcatgcagaagtacggcttccgggagggccagggtctggggaagcatgagcagggcctgagcactgccttgtcagtggagaagaccagcaagcgtggcggcaagatcatcgtgggcgacgccacagagaaagatgcatccaagaagtcagattcaaatccgctgactgaaatacttaagtgtcctactaaagtggtcttactaaggaacatggttggtgcgggagaggtggatgaagacttggaagttgaaaccaaggaagaatgtgaaaaatatggcaaagttggaaaatgtgtgatatttgaaattcctggtgcccctgatgatgaagcagtacggatatttttagaatttgagagagttgaatcagcaattaaagcggttgttgacttgaatgggaggtattttggtggacgggtggtaaaagcatgtttctacaatttggacaaattcagggtcttggatttggcagaacaagtttgattttaagaactagagcacgagtcatctccggtgatccttaaatgaactgcaggctgagaaaagaaggaaaaaggtcacagcctccatggctgttgcataccaagactcttggaaggacttctaagatatatgttgattgatcccttttttattttgtggttttttaatatagtataaaaatccttttaaaaaaacaacaatctgtgtgcctctctggttgtttctcttttttattattactcctgagttgatgacattttttgttagatttcatggtaattctcaagtgcttcaatgatgcagcatttcttgcactaaaaaaaaaaaaaaaaaaaaaactagaaagttttgggacatggggttatattaaattattctttgtttttctttttcttttaataaagcctgcaagttactaaattgtagtttcataaattctgtagtaaagtatcatcttggcagtgtgccaaaggtgaaaatgatgctttctctaacagagaaattcttagtgactccagtcgtagaaaaacgtctttacaacctgaataagattgaagaattgtgaacataccatggcctattggatgaatcatttgccgtaggctaaatcagactgtagggtttgtgatggatttatggagtatgtgggtatagaaatcatgaatctagcatttgttttcagagattcaagcatagtcttaagggtagatcagaaatgacaaatgaattcaaaacctagcaggtgcattgtaaatgtgtgcccagttatgttttggaaatggcagttccttggggtcatgtttctactggcaaaatttgcaatagtgttctattgtatgtaattttaaaatttataagattatccacgttggccaagtaaactgtactgccaatagaattctggaattgtgagaaattgtatcattgaagttcagtaggatgtgtggcttaaaaatttatcaggaccacaaaaaagaaaacaaaaatatttggtactgaggttcattgccagggcaggaggtatttccagaaaatactcatgcctgtgttctgttccttgctttcccaaatactgcatgtgactttcctaagcggcagctgaaagactcgagcccgtgctgtctcctttggttattatgacatgaaagtgtatcaagaactcagcatttctttgcatccatggacttggtttggagacataaggaatattctgaccctttttaaaaaaggattttctcatgtttttatttaacataaataaaagaataacattttatcttttgtggtattattttattgaataaaattgagttttatgataaaa

SEQ ID NO: 4386 - DNA, 3751 bp, Homo sapiens
  source 1..3751: mol_type = genomic DNA
agtccccgcggcgggcgctggtctctccacgcggctgcggcccggtaccctccgcccgccgccgcctctggtgaccctggccctgaccttctccctcttcccttcctcctcctcctcctcatgtctgcctcgggctgtttggtgctgaagagcgtttcttctccgtctcgtgcaccgcatcctgacgaaattgtctggtcaccagaaccgagtagcccgtagcgtgtcccccctggccctgcacggttgcccctctctggggctcggagccggttcctcccggggtctcagaactgggagtgcagacgttggcgtttctcagactccggagctgcccgggacaggaatgcagccctaaccccggcgtcgcctcggctcgtgcagtttgagcggtgtttcagcgctcacgtccgaccccaggcagtctttgagcttcgcctcttgccccgagaatgtgtaatgatcggagaatgcaggtggaatgaggttctgcccctgcttgcaggagtttggtttctgggaaagcaggcgtgaaaacccaggcccgggttgatttgagaaacgcaagtggggtctggaaggacctctcttgagagaggaggtcatgcttatgttgagtcttgaagcattaaactgaagaaaagatgtccctgtacgatgacctaggagtggagaccagtgactcaaaaacagaaggctggtccaaaaacttcaaacttctgcagtctcagcttcaggtgaagaaggcagctctcactcaggcaaagagccaaaggacgaaacaaagtacagtcctcgccccagtcattgacctgaagcgaggtggctcctcagatgaccggcaaattgtggacactccaccgcatgtagcagctgggctgaaggatcctgttcccagtgggttttctgcaggggaagttctgattcccttagctgacgaatatgaccctatgtttcctaatgattatgagaaagtagtgaagcgccaaagagaggaacgacagagacagcgggagctggaaagacaaaaggaaatagaagaaagggaaaaaaggcgtaaagacagacatgaagcaagtgggtttgcaaggagaccagatccagattctgatgaagatgaagattatgagcgagagaggaggaaaagaagtatgggcggagctgccattgccccacccacttctctggtagagaaagacaaagagttaccccgagattttccttatgaagaggactcaagacctcgatcacagtcttccaaagcagccattcctcccccagtgtacgaggaacaagacagaccgagatctccaaccggacctagcaactccttcctcgctaacatggggggcacggtggcgcacaagatcatgcagaagtacggcttccgggagggccagggtctggggaagcatgagcagggcctgagcactgccttgtcagtggagaagaccagcaagcgtggcggcaagatcatcgtgggcgacgccacagagaaagatgcatccaagaagtcagattcaaatccgctgactgaaatacttaagtgtcctactaaagtggtcttactaaggaacatggttggtgcgggagaggtggatgaagacttggaagttgaaaccaaggaagaatgtgaaaaatatggcaaagttggaaaatgtgtgatatttgaaattcctggtgcccctgatgatgaagcagtacggatatttttagaatttgagagagttgaatcagcaattaaagcggttgttgacttgaatgggaggtattttggtggacgggtggtaaaagcatgtttctacaatttggacaaattcagggtcttggatttggcagaacaagtttgattttaagaactagagcacgagtcatctccggtgatccttaaatgaactgcaggctgagaaaagaaggaaaaaggtcacagcctccatggctgttgcataccaagactcttggaaggacttctaagatatatgttgattgatcccttttttattttgtggttttttaatatagtataaaaatccttttaaaaaaacaacaatctgtgtgcctctctggttgtttctcttttttattattactcctgagttgatgacattttttgttagatttcatggtaattctcaagtgcttcaatgatgcagcatttcttgcactaaaaaaaaaaaaaaaaaaaaaactagaaagttttgggacatggggttatattaaattattctttgtttttctttttcttttaataaagcctgcaagttactaaattgtagtttcataaattctgtagtaaagtatcatcttggcagtgtgccaaaggtgaaaatgatgctttctctaacagagaaattcttagtgactccagtcgtagaaaaacgtctttacaacctgaataagattgaagaattgtgaacataccatggcctattggatgaatcatttgccgtaggctaaatcagactgtagggtttgtgatggatttatggagtatgtgggtatagaaatcatgaatctagcatttgttttcagagattcaagcatagtcttaagggtagatcagaaatgacaaatgaattcaaaacctagcaggtgcattgtaaatgtgtgcccagttatgttttggaaatggcagttccttggggtcatgtttctactggcaaaatttgcaatagtgttctattgtatgtaattttaaaatttataagattatccacgttggccaagtaaactgtactgccaatagaattctggaattgtgagaaattgtatcattgaagttcagtaggatgtgtggcttaaaaatttatcaggaccacaaaaaagaaaacaaaaatatttggtactgaggttcattgccagggcaggaggtatttccagaaaatactcatgcctgtgttctgttccttgctttcccaaatactgcatgtgactttcctaagcggcagctgaaagactcgagcccgtgctgtctcctttggttattatgacatgaaagtgtatcaagaactcagcatttctttgcatccatggacttggtttggagacataaggaatattctgaccctttttaaaaaaggattttctcatgtttttatttaacataaataaaagaataacattttatcttttgtggtattattttattgaataaaattgagttttatgataaaagtgcacctgttctgtaaagtaagttggggttaaggaatgtgaggtaaattacataattgaacattgtggaagacagaatcaaaagcagccctggaacttcagttatctatggaattaggcataccattcctcaagtggaaaccatgtttgtgcttacaagtaccggagtgtgcttgtttaattttagaaactaatggttccaacccacctttcatgcatgcatttattgttgttatgctttgtaaaacattgtttgcacctaaatgggtggcttttcctaacattctcatggtcagcaaccagagagttgcaaccaactcatactacttgatttccgttcgcatgaggacagcttggtgtgtgcctttctccccagtcttttatttttaaaataactgtgttaatcagttagtgctttatttataatgaatttctgatagtcgaataatttctaaatctcctgcaagttagtacttgagaaatttgaaattaattttcaatattaacatttaagctaatataaaaattttaaatttcaataaaaattaaaaattatgtaagctacaatgtaactggc

SEQ ID NO: 4387 - DNA, 3043 bp, Homo sapiens
  source 1..3043: mol_type = genomic DNA
taacgcgtcacgggcggcctggcagctggcggcattgaggcggacgcgtctagaggtccgtctgaccgcggcgtcgggacctggtttccgggcatgagctgagagcaccacgccgaggccacgagtatttcatagacattgatggaagcagaaaccaaaactcttcccctggagaatgcatccatcctttcagagggctctctgcaggaaggacaccgattatggattggcaacctggaccccaaaattaccgaataccacctcctcaagctcctccagaagtttggcaaggtaaagcagtttgacttcctcttccacaagtcaggtgctttggagggacagcctcgaggctactgttttgttaactttgaaactaagcaggaagcagagcaagccatccagtgtctcaatggcaagttggccctgtccaagaagctggtggtgcgatgggcacatgctcaagtaaagagatatgatcataacaagaatgataagattcttccaatcagtctcgagccatcctcaagcactgagcctactcagtctaacctaagtgtcactgcaaagataaaagccattgaagcaaaactgaaaatgatggcggaaaatcctgatgcagagtatccagcagcgcctgtttattcctactttaagccaccagataaaaaaaggactactccatattctagaacagcatggaaatctcgaagatgatggttgtgaattactgtagcagcaaaagcaaattggtctccacacctaaaatcgtctgcctgtgtactttgtagatgtgaatggtactattcaacggagcacaatcacatgttagcatttggtaacataatgtttttggatgttcttatggatgtttcttccctaaactatgtatggaattgagcatcatccagaataaatagcgttgtatcccaaattgtgatttgaaccctgggatgctctaattggctggttggtttggatttgtaactccagaaacattctatagtgtgccagagcaaaaggcaaatacacaaaatattatttaaatcaggaaactaaaaatattaacatctattaaaaaattgagcatttttctacgctcgtgtgtcttttacaacataaagaaaaagtaaaaggcagggagggaagtgagagacagattttaaatcatgttcagaactgttgttccagaatttactacggcaatccctccaactggactgaaaaagagaaagttcttggcaaaaaggagctgattctttgaacaaatgttgtagtaatctgtttaagaattatgcttattgtttcaaaatcccaactaggaaaacatggtgtatatcttaaaattgtttgtgttgacaaaactagaatcaaatttaacattttataccacaacacaagttctatttggaaattgaacttttattctatagcaaccatttttttcaaatctaaataaccatgccttctataataacaaatgttgctattatcatgggacttttaaaattacatttattgcatgggattgtttttatagcatgagaatgttctgtttggaattatatcatggtcagtctaaatagaaaaagcaaaatttctttgaaaacctaaacattgctatattggtcactatcaaacatacaattttctaataattgtgtagcggtctaagtggaagagattgcattatcttgtgcaggacgaggagaggacatgcagtgggcacagaaagtcaatggaacagatgccactgtggcaccaagactgtaatgactctgtgtggtaggtagttttaaaggactgcatgccttggaaatgattcttcacttggagaacatacttgcctctagatatgtttgtcactctaagcatcctgaatataacaatagagaaagataagtcaaccaacagatttagggatgtgtttcttcagcacattttggtcattttgatgccaagtttgacatactgtttaattgggcagcacctttgctcctttaccaggtatgtatcactttgttactccaggtgccattcttggtgatgacagaatgtttatcactatcgttgttagcaagaggaagctttcaatataggaacttaacatcttcccatgagtataaatgaatttaagacatttgaatcaaaacttcagtagagggaggttttagaattcataaaactggtttaaggaaattctttttacttttcccaaggttaatctttttaaatatctctagacatcaaatactttctgtatgtattagctgtgtctgtctatgatgcaagtaactctcctcctatttgggggatagttcagagaggtaggagcattatctcccatttttctggtgacttcttggagtatagaattcaccattttatccgtaagtcttcaaaggattatggtggactagaacttacatagtgcaaaatagtcttctatttttaataggaacttagaaaaaacttagaattatatatagagttgtttcctttagaaaccagagctatttatttgtatttaaagcactgtttattatttgtactgattcttatccctctgtgtgaataaatgtaagacggtgtccgtgtggttatatcttctctcgttcacttactggcatagactgcagttctctgacaggcttgtttccactcaggactctggccagcatgtccacgtggggtgcttcttctaagtgccttctctgcagagggttctggctagagagtcaaactgagaggcaactctctttaccctttatgcctgcctacctctgttgttagagatgagaatagagaccagctgtttccattgcaaatgtcactatttgaaaagaagttgttaatggaaatctctgcaagtatcgtactgtgtttagtctctcgtggtagagatttcaaaagaagaaatgtatgtatcctaaatatgctgaaagcagtctgatgaaaggtttttaaatttcaggtgttaacttggtcaactctttgttaggaggttgtctgtactttaagtaaaattattctttggtttactggt

SEQ ID NO: 4388 - DNA, 4422 bp, Homo sapiens
  source 1..4422: mol_type = genomic DNA
cgcccagggcggtagcgtgaaacttggtggaagacgctgaccagtcgtgttggaatcaaaacagcggggaccctgcgccatgtcgcgactgatcgtgaagaatctcccgaatgggatgaaggaggagcgtttcaggcagctgtttgccgccttcggcacgctgacagactgcagcctgaagttcaccaaagatggcaagttccgcaagtttggttttattggcttcaagtccgaggaagaggcccagaaggcacagaagcatttcaacaagagcttcatcgacacatcccggatcacagtggagttctgcaagtcattcggggacccggccaaacccagagcctggagcaaacatgcccagaaaccaagccagcccaagcagcctccaaaagactctactactccagaaattaagaaagatgagaagaagaaaaaggtggcaggtcaactggagaagctgaaggaggatacagagttccaggagtttctgtcagttcatcagaggcgggcgcaggcagccacttgggcgaatgatggcctggatgctgagccctcgaaagggaagagcaagccggccagtgactacctgaacttcgactccgattctgggcaggagagtgaggaggagggagccggggaggacctggaagaagaggcaagcctcgaaccaaaggcagctgtgcagaaggagctgtcggacatggattacctgaaatccaagatggtgaaggctgggtcgtcctcttcctcggaggaagaggaaagtgaagatgaagccgtgcactgtgatgaagggagtgaggccgaggaagaggattcctccgccaccccagtcctgcaggaaagagacagcaagggtgcaggccaagagcaagggatgccagctgggaaaaagagaccaccggaggccagagccgagacagagaaaccagcaaaccagaaggaacccaccacctgccacaccgtgaagctgcggggagccccgttcaatgtcacagagaaaaatgttatggaattcctggcacccctgaaaccagtggccattcgaattgtgagaaacgctcatgggaataaaacaggatacatctttgtggatttcagcaatgaagaggaagtgaagcaagctctgaaatgcaaccgggagtacatgggtgggcgctacatcgaggtgttcagggaaaagaacgtccccaccaccaagggtgcaccaaagaataccaccaaatcctggcaaggccggatactcggggagaacgaagaggaggaggacctggccgaatccggaaggctctttgtacggaacctgccctacaccagcaccgaggaggatctggagaagctcttctccaaatatggtcccctgtctgagctccactaccccatcgacagcctgaccaagaaacccaagggttttgcattcatcaccttcatgttccctgagcacgctgtgaaggcctactcggaggtggacgggcaggtattccagggcaggatgctccacgtgttaccatctaccatcaagaaggaagccagcgaggatgccagtgccctgggatcgtcgtcctacaagaagaagaaggaggcccaggacaaagccaacagtgccagctctcacaactggaacacactattcatggggccgaatgccgtggccgatgccatcgcacagaagtacaacgccaccaagagtcaagtgtttgaccacgagaccaagggcagcgtggccgtgcgcgtggctctgggggaaacccagctcgtccaggaagtgcggcgttttctcatagacaacggggtcagcctggattccttcagccaggctgcagcagagcgaagcaagactgtgattctggtcaagaacctcccggcaggcaccctggcggcccagctgcaggagaccttcggccattttggcagcctgggccgcgtgctgctgccagagggcggaatcactgccatcgtggagttcctggagcccctggaggcccgcaaggccttcaggcatctggcctattccaagttccatcatgtccccctctatctggagtgggctccagttggcgtcttctccagcacagccccacagaagaaaaagctccaagacacaccttcagaacccatggaaaaggacccagcagagccagaaacagtgcctgatggcgaaaccccagaagatgaaaatccaacagaggaaggagcagacaactcttcagcaaagatggaagaggaggaggaggaagaggaagaagaagaagagagcctcccaggatgtactctgtttattaagaatctcaattttgacacaacagaagagaagctgaaggaagtgttttcaaaagtggggacagtgaagagctgctccatctccaagaagaagaacaaagcaggagtgctcctttccatggggtttggatttgtggaatacaggaagccggagcaagcccagaaagctctcaagcagctccagggtcacgtcgtggacggccacaagctggaagtgaggatctcggaacgagccactaagccagccgtgacattggctcggaagaaacaagttcccagaaagcagaccacctccaagatcctggtgcggaacatccccttccaggcccacagccgggagatccgagagctcttcagcacctttggggagttgaagacggtccgcctgccaaagaagatgactgggacaggcacacacagaggcttcggctttgtggacttcctcaccaagcaggatgcgaagagagccttcaacgccctgtgtcacagcacccacttgtacgggcggaggctggtgctggagtgggccgactccgaggtgaccctgcaggccctgcggcggaagacggccgctcactttcacgagcccccgaagaaaaagcggtctgtggtgttggacgagatcctggagcagctggaaggcagtgacagcgacagcgaggagcagacccttcagctgtgagctggcaccgagagggctggagtgcagtggcgtgatctgggctcacctccctggttcaagcgattgtcccgcctcagcctcccaaggctgggattacaggtatgcaccaccacgcccggctaattttgtatttttcatagagactgggtttcaccatgtagaccaggctggtctcgaattcctgacctcaagtgatccacctacctcggcctcccaaagtgtggggattacgggtgtgagccaccacgcccggctaattttttgtatttttagtagacagggtttcaccatgtgggccaggctggtcttgaactcccaacctcaagtgatccacccaccttgttctcccaaagtgctgagattacaggtgtgagccaccatgcccagcctgttcctaaccctttcaactggggggtctcaagtgggtgaggactccatggccacggcagcagaactgtctcttctgaaaaccagactccggggcccctgggtcagcacctctaggtcattccacagacttacacagtttaaagaaagagccagcgaacatggggtgatcctggggtgccactgggatcccaagccaggcccggaggtctgcctgtttcgtccccagaaacttgagctggcatcctccgctggtttgcactgggcacggggactggagagccaccaggccactgagcgcagcatgctatcacttctcaggaagttgtgagggtgaggagaatagccgggcccactctgcagaggggaggaacaggcacaggctagaggcacgggctgatagagtgagtcctctccctcattcattcattcattcattcattcatccatcagacacctgctgggcatctgctgtgtgcgagacactgtgctgggtgccccagacacaagacagaaactcgggtcgctctgtgtgcctccacactggccttccctgctgcgtggacgcaggctctgtctcctaggctttaagccccatgcatcaggtggaagacaatttccagcagcctctgcccgcttgtttttcctcctctccttttcctgccgccttggtcttttttgtcttttgtgcagggccgtctctcgcagcgcccgtctgtgctccgcagcgtctaggaaaggattagtgtgagcagagcacgcaggctttggtgaacagagccgagcttggtttcaacatctaattcaatttgttctgccgagattgaaatatgaaatggttgccagtcaaacgttcaaaggacggggaagggagagtgagcgcatgctgaaatttaaattttaatgaaaatgactttaaccctttggtacaccttgcaaaatgtaacccatcctcccatcctgtgaaagcggcctctcgggttagagcttttccacccacttctcttccactgagcttcactaataatatgtaatcatttttttcagccgtcttaataataaaagattaatag

SEQ ID NO: 4389 - DNA, 4194 bp, Homo sapiens
  source 1..4194: mol_type = genomic DNA
cttccggacaggtcaggccaaggtctcagccacgtgactgtgttccggctcggtaaagatggcggcgcccagggcggtagcgtgaaacttggtggaagacgctgaccagtcgtgttggaatcaaaacagcggggaccctgcgccatgtcgcgactgatcgtgaagaatctcccgaatgggatgaaggaggagcgtttcaggcagctgtttgccgccttcggcacgctgacagactgcagcctgaagttcaccaaagatggcaagttccgcaagtttggttttattggcttcaagtccgaggaagaggcccagaaggcacagaagcatttcaacaagagcttcatcgacacatcccggatcacagtggagttctgcaagtcattcggggacccggccaaacccagagcctggagcaaacatgcccagaaaccaagccagcccaagcagcctccaaaagactctactactccagaaattaagaaagatgagaagaagaaaaaggtggcaggtcaactggagaagctgaaggaggatacagagttccaggagtttctgtcagttcatcagaggcgggcgcaggcagccacttgggcgaatgatggcctggatgctgagccctcgaaagggaagagcaagccggccagtgactacctgaacttcgactccgattctgggcaggagagtgaggaggagggagccggggaggacctggaagaagaggcaagcctcgaaccaaaggcagctgtgcagaaggagctgtcggacatggattacctgaaatccaagatggtgaaggctgggtcgtcctcttcctcggaggaagaggaaagtgaagatgaagccgtgcactgtgatgaagggagtgaggccgaggaagaggattcctccgccaccccagtcctgcaggaaagagacagcaagggtgcaggccaagagcaagggatgccagctgggaaaaagagaccaccggaggccagagccgagacagagaaaccagcaaaccagaaggaacccaccacctgccacaccgtgaagctgcggggagccccgttcaatgtcacagagaaaaatgttatggaattcctggcacccctgaaaccagtggccattcgaattgtgagaaacgctcatgggaataaaacaggatacatctttgtggatttcagcaatgaagaggaagtgaagcaagctctgaaatgcaaccgggagtacatgggtgggcgctacatcgaggtgttcagggaaaagaacgtccccaccaccaagggtgcaccaaagaataccaccaaatcctggcaaggccggatactcggggagaacgaagaggaggaggacctggccgaatccggaaggctctttgtacggaacctgccctacaccagcaccgaggaggatctggagaagctcttctccaaatatggtcccctgtctgagctccactaccccatcgacagcctgaccaagaaacccaagggttttgcattcatcaccttcatgttccctgagcacgctgtgaaggcctactcggaggtggacgggcaggtattccagggcaggatgctccacgtgttaccatctaccatcaagaaggaagccagcgaggatgccagtgccctgggatcgtcgtcctacaagaagaagaaggaggcccaggacaaagccaacagtgccagctctcacaactggaacacactattcatggggccgaatgccgtggccgatgccatcgcacagaagtacaacgccaccaagagtcaagtgtttgaccacgagaccaagggcagcgtggccgtgcgcgtggctctgggggaaacccagctcgtccaggaagtgcggcgttttctcatagacaacggggtcagcctggattccttcagccaggctgcagcagagcgaagcaagactgtgattctggtcaagaacctcccggcaggcaccctggcggcccagctgcaggagaccttcggccattttggcagcctgggccgcgtgctgctgccagagggcggaatcactgccatcgtggagttcctggagcccctggaggcccgcaaggccttcaggcatctggcctattccaagttccatcatgtccccctctatctggagtgggctccagttggcgtcttctccagcacagccccacagaagaaaaagctccaagacacaccttcagaacccatggaaaaggacccagcagagccagaaacagtgcctgatggcgaaaccccagaagatgaaaatccaacagaggaaggagcagacaactcttcagcaaagatggaagaggaggaggaggaagaggaagaagaagaagagagcctcccaggatgtactctgtttattaagaatctcaattttgacacaacagaagagaagctgaaggaagtgttttcaaaagtggggacagtgaagagctgctccatctccaagaagaagaacaaagcaggagtgctcctttccatggggtttggatttgtggaatacaggaagccggagcaagcccagaaagctctcaagcagctccagggtcacgtcgtggacggccacaagctggaagtgaggatctcggaacgagccactaagccagccgtgacattggctcggaagaaacaagttcccagaaagcagaccacctccaagatcctggtgcggaacatccccttccaggcccacagccgggagatccgagagctcttcagcacctttggggagttgaagacggtccgcctgccaaagaagatgactgggacaggcacacacagaggcttcggctttgtggacttcctcaccaagcaggatgcgaagagagccttcaacgccctgtgtcacagcacccacttgtacgggcggaggctggtgctggagtgggccgactccgaggtgaccctgcaggccctgcggcggaagacggccgctcactttcacgagcccccgaagaaaaagcggtctgtggtgttggacgagatcctggagcagctggaaggcagtgacagcgacagcgaggagcagacccttcagctgtgagctggcaccgagagggtgtgtggctccggggccctggggaccgggacagccgctccagcttctgcactcaccaccatgtgggctggggggcggggcggggagcggcaggcggccccaccctgcactggtccaaggtcggaggagacaggggatgaggaaggcctcaggccactgcccagcggcccaggcatcctgggtttcaccagtgacgcgttctagcagacactgactgcgcacctgctctgtagcagacacggaagagtccaagggagcagccacgttaggaagagagacttgggaacagctacacagggagctagaacccctgctccccctgtccccaccccaggagagtaaggggacgagggccagctctctggcatcaggctgcttggacatgaaaccccgtctccaagctcaagctgggagaccctggcccagtttccttatctccttgggcccagccttccccttgctagctagttcttacttcataaggttttagagagaaataaacgcagtaatgcatgaagagtgccgggcatggtgctgagccctgttcctgctctccctccagggctgctgagctagaattcccacctatgtctttccaagggactgttcacggcttgggacttggtctctgtcctgccccatcctcgtcacttgggaccacgagccctggttcagtcacccagggaagcctcccagcggctcatgaagcatcgagctccaagcccagatgccaagctccctggctgagctgaatgatgtcactcatggtggacgcgttctgctcacgggcccagagccctgtgaaatgcatcaaggtcctctccgctggccagcagcatccccaggcttctctcaggcgcccgtgttcacattttctccagcctgagacgcagcctcccgcctggaagggcctgtgccagcaccaggcagagggcaagacggagagggcagagcaagaactgcactgcatctcactgcagtctgaatctagacatcgccattccccgaggtgcgacctcagactaatgacatcctggctgagcctctgtttttctctctaggaaatgggggtgataattgtgcctacctcagatagacagtgccagaattaagtgagtcaagccaagtaaagcccagagaagattctcatca

SEQ ID NO: 4390 - DNA, 3571 bp, Homo sapiens
  source 1..3571: mol_type = genomic DNA
gcggcgcccagggcggtagcgtgaaacttggtggaagacgctgaccagtcgtgttggaatcaaaacagcggggaccctgcgccatgtcgcgactgatcgtgaagaatctcccgaatgggatgaaggaggagcgtttcaggcagctgtttgccgccttcggcacgctgacagactgcagcctgaagttcaccaaagatggcaagttccgcaagtttggttttattggcttcaagtccgaggaagaggcccagaaggcacagaagcatttcaacaagagcttcatcgacacatcccggatcacagtggagttctgcaagtcattcggggacccggccaaacccagagcctggagcaaacatgcccagaaaccaagccagcccaagcagcctccaaaagactctactactccagaaattaagaaagatgagaagaagaaaaaggtggcaggtcaactggagaagctgaaggaggatacagagttccaggagtttctgtcagttcatcagaggcgggcgcaggcagccacttgggcgaatgatggcctggatgctgagccctcgaaagggaagagcaagccggccagtgactacctgaacttcgactccgattctgggcaggagagtgaggaggagggagccggggaggacctggaagaagaggcaagcctcgaaccaaaggcagctgtgcagaaggagctgtcggacatggattacctgaaatccaagatggtgaaggctgggtcgtcctcttcctcggaggaagaggaaagtgaagatgaagccgtgcactgtgatgaagggagtgaggccgaggaagaggattcctccgccaccccagtcctgcaggaaagagacagcaagggtgcaggccaagagcaagggatgccagctgggaaaaagagaccaccggaggccagagccgagacagagaaaccagcaaaccagaaggaacccaccacctgccacaccgtgaagctgcggggagccccgttcaatgtcacagagaaaaatgttatggaattcctggcacccctgaaaccagtggccattcgaattgtgagaaacgctcatgggaataaaacaggatacatctttgtggatttcagcaatgaagaggaagtgaagcaagctctgaaatgcaaccgggagtacatgggtgggcgctacatcgaggtgttcagggaaaagaacgtccccaccaccaagggtgcaccaaagaataccaccaaatcctggcaaggccggatactcggggagaacgaagaggaggaggacctggccgaatccggaaggctctttgtacggaacctgccctacaccagcaccgaggaggatctggagaagctcttctccaaatatggtcccctgtctgagctccactaccccatcgacagcctgaccaagaaacccaagggttttgcattcatcaccttcatgttccctgagcacgctgtgaaggcctactcggaggtggacgggcaggtattccagggcaggatgctccacgtgttaccatctaccatcaagaaggaagccagcgaggatgccagtgccctgggatcgtcgtcctacaagaagaagaaggaggcccaggacaaagccaacagtgccagctctcacaactggaacacactattcatggggccgaatgccgtggccgatgccatcgcacagaagtacaacgccaccaagagtcaagtgtttgaccacgagaccaagggcagcgtggccgtgcgcgtggctctgggggaaacccagctcgtccaggaagtgcggcgttttctcatagacaacggggtcagcctggattccttcagccaggctgcagcagagcgaagcaagactgtgattctggtcaagaacctcccggcaggcaccctggcggcccagctgcaggagaccttcggccattttggcagcctgggccgcgtgctgctgccagagggcggaatcactgccatcgtggagttcctggagcccctggaggcccgcaaggccttcaggcatctggcctattccaagttccatcatgtccccctctatctggagtgggctccagttggcgtcttctccagcacagccccacagaagaaaaagctccaagacacaccttcagaacccatggaaaaggacccagcagagccagaaacagtgcctgatggcgaaaccccagaagatgaaaatccaacagaggaaggagcagacaactcttcagcaaagatggaagaggaggaggaggaagaggaagaagaagaagagagcctcccaggatgtactctgtttattaagaatctcaattttgacacaacagaagagaagctgaaggaagtgttttcaaaagtggggacagtgaagagctgctccatctccaagaagaagaacaaagcaggagtgctcctttccatggggtttggatttgtggaatacaggaagccggagcaagcccagaaagctctcaagcagctccagggtcacgtcgtggacggccacaagctggaagtgaggatctcggaacgagccactaagccagccgtgacattggctcggaagaaacaagttcccagaaagcagaccacctccaagatcctggtgcggaacatccccttccaggcccacagccgggagatccgagagctcttcagcacctttggggagttgaagacggtccgcctgccaaagaagatgactgggacaggcacacacagaggcttcggctttgtggacttcctcaccaagcaggatgcgaagagagccttcaacgccctgtgtcacagcacccacttgtacgggcggaggctggtgctggagtgggccgactccgaggtgaccctgcaggccctgcggcggaagacggccgctcactttcacgagcccccgaagaaaaagcggtctgtggtgttggacgagatcctggagcagctggaaggcagtgacagcgacagcgaggagcagacccttcagctgtgagctggcaccgagaggggctgctgagctagaattcccacctatgtctttccaagggactgttcacggcttgggacttggtctctgtcctgccccatcctcgtcacttgggaccacgagccctggttcagtcacccagggaagcctcccagcggctcatgaagcatcgagctccaagcccagatgccaagctccctggctgagctgaatgatgtcactcatggtggacgcgttctgctcacgggcccagagccctgtgaaatgcatcaaggtcctctccgctggccagcagcatccccaggcttctctcaggcgcccgtgttcacattttctccagcctgagacgcagcctcccgcctggaagggcctgtgccagcaccaggcagagggcaagacggagagggcagagcaagaactgcactgcatctcactgcagtctgaatctagacatcgccattccccgaggtgcgacctcagactaatgacatcctggctgagcctctgtttttctctctaggaaatgggggtgataattgtgcctacctcagatagacagtgccagaattaagtgagtcaagccaagtaaagcccagagaagattctcatca

SEQ ID NO: 4391 - DNA, 7271 bp, Homo sapiens
  source 1..7271: mol_type = genomic DNA
ccgggaccgcccctcccttgagctctctcgccgcgatcccgggcgggtctcgccccgcatggtgctggcagcagccatgagccaggacgcggaccccagcggtccggagcagccggacagagttgcctgcagtgtgcctggtgcccgggcgtccccggcaccctccggcccgcgagggatgcagcagccgccgccgccgccccagccaccgcccccgccccaagccggcctaccccagatcatccaaaatgccgccaagctcctggacaagaacccattctcggtcagtaacccgaaccctctgcttccttcacctgccagtctccagctggctcaactgcaggcccagctcaccctccaccggctgaagctggcacagacagctgtcaccaacaacactgcagccgccacagtcctgaaccaagtcctctccaaagtggccatgtcccagcctctcttcaatcaactgaggcatccgtctgtgatcactggcccccacggccatgctggggttccccaacatgctgcagccatacccagtacccggtttccctctaatgcaattgccttttcaccccccagccagacacgaggccccggaccctccatgaaccttcccaaccagccacccagtgccatggtgatgcatcctttcactggggtaatgcctcagacccctggccagccagcagtcatcttgggcattggcaagactgggcctgctccagctacagcaggattctatgagtatggcaaagccagctctggccagacatatggccctgaaacagatggtcagcctggcttcctgccatcctcggcctcaacctcgggcagtgtgacctatgaagggcactacagccacacagggcaggatggtcaagctgccttttccaaagatttttacggacccaactcccaaggttcacatgtggccagcggatttccagctgagcaggctgggggcctgaaaagtgaggtcgggccactgctgcagggcacaaacagccaatgggagagcccccatggattctcgggccaaagcaagcctgatctcacagcaggtcccatgtggcctccaccccacaaccagccctatgagctgtacgaccccgaggaaccaacctcagacaggacacctccttccttcgggggtcggcttaacaacagcaaacagggttttatcggtgctgggcggagggccaaggaggaccaggcgttgctatctgtgcggcccctgcaggctcatgagctgaacgactttcacggtgtggcccccctccacttgccgcatatctgtagcatctgtgacaagaaggtgtttgatttgaaggactgggagctgcatgtgaaagggaagctgcacgctcagaaatgcctggtcttctctgaaaatgctggcatccggtgtatacttggttcggcagagggaacattgtgtgcttctcccaacagcacagctgtttataaccctgctgggaatgaagattatgcctcaaatcttggaacatcatacgtgcccattccagcaaggtcattcactcagtcaagccccacatttcctttggcttctgtggggacaacttttgcacagcggaaaggggctggccgtgtggtgcacatctgcaatctccctgaaggaagctgcactgagaatgacgtcattaacctggggctgccctttggaaaggtcactaattacatcctcatgaagtcgactaatcaggcctttttagagatggcttacacagaagctgcacaggccatggtccagtattatcaagaaaaatctgctgtgatcaatggtgagaagttgctcattcggatgtccaagagatacaaggaattgcagctcaagaaacccgggaaggccgtggctgccatcatccaggacatccattcccagagggagagggacatgttccgggaagcagacagatatggcccagaaaggccgcggtctcgtagtccggtgagccggtcactctccccgaggtcccacactcccagcttcacctcctgcagctcttcccacagccctccgggcccctcccgggctgactggggcaatggccgggactcctgggagcactctccctatgccaggagggaggaagagcgagacccggctccctggagggacaacggagatgacaagagggacaggatggacccctgggcacatgatcgcaaacaccacccccggcaactggacaaggctgagttggacgagcgaccagaaggagggaggccccaccgggagaagtacccgagatctgggtctcccaacctgccccactctgtgtccagctacaaaagccgtgaagacggctactaccggaaagagcccaaagccaagtgggacaagtatctgaagcagcagcaggatgcccccgggaggtccaggaggaaagacgaggccaggctgcgggaaagcagacacccccatccggatgactcaggcaaggaagatgggctggggccaaaggtcactagggcccctgagggcgccaaggccaagcagaatgagaaaaataaaaccaagagaactgatagagaccaagaaggagctgatgatagaaaagaaaacacaatggcagagaatgaggctggaaaagaggaacaggagggcatggaagaaagccctcaatcagtgggcagacaggagaaagaagcagagttctctgatccggaaaacacaaggacaaagaaggaacaagattgggagagtgaaagtgaggcagagggggagagctggtatcccactaacatggaggagctggtgacagtggacgaggttggggaagaagaagattttatcgtggaaccagacatcccagagctggaagaaattgtgcccattgaccagaaagacaaaatttgcccagaaacatgtctgtgtgtgacaaccaccttagacttagacctggcccaggatttccccaaggaaggagtcaaggccgtagggaatggggctgcagaaatcagcctcaagtcacccagagaactgccctctgcttccacaagctgtcccagtgacatggacgtggaaatgcctggcctaaatctggatgctgagcggaagccagctgaaagtgagacaggcctctccctggaggattcagattgctacgagaaggaggcaaagggagtggagagctcagatgttcatccagcccctacagtccagcaaatgtcttcccctaagccagcagaggagagggcccggcagccaagcccatttgtggatgattgcaagaccagggggacccccgaagatggggcttgtgaaggcagccccctggaggagaaagccagcccccccatcgaaactgacctccaaaaccaagcttgccaagggtctgacagtgatacaagacttgtttcaggatattctctcactccattggagaaaactccaggtacgtggaaatgaaatctctggaggtgaggtcaccagagtacactgaagtggaactgaaacagcccctttctttgccctcttgggaaccagaggatgtgttcagtgaacttagcattcctctaggggtggagttcgtggttcccaggactggcttttattgcaagctgtgtgggctgttctacacgagcgaggagacagcaaagatgagccactgccgcagcgctgtccactacaggaacttacagaaatatttgtcccagctggccgaggagggcctcaaggagaccgagggggcagatagcccgaggccagaggacagcggaatcgtgccacgcttcgaaaggaaaaagctctgatgcttctgcttctgctgctactgctgctgctgcaaggttggaaaggagagcttgctgaagtggggccttcctgattctggggacaggactaaagcctgagaggaaggaaaaccaagcagggcacattgcttgggcttgttcccagagactcagtgaaatgcccctgatatgtctccaggagcaagtcacccaggtgtgtccagcccactgagggtcaccaactctctccctgctgactcttgtttctctcaatctttcaattcgtttttctctcttttcctcttgttctttctctccctccctccttatgtgccaaggatcgtttccttttcacaaaacccaacttctcagggattttcacagtgtttaaattcttggtaggatataacaggtcaggcctagctgagtcaggcaaggaaaaggtttaatggaaactcctgggtcaggcgaacccctgcagtgagtctacagcagtatctctgcctggtgtcccatgtatcccctgcatgaggagctgagtcaggtctgcagtcctggtgaggggacatcacggacaatctgttggcagagctgggagggtcttcattaacctcttcctccaactgggccacccttttgaaaagcccctgtttttaataactgtttcatcctctcagttattctagaaatctgccagacttatgccttaaagtaaaattaaatgaattttagagaagatgaaaagagcccttcattttggaagctctgataagtttcctccaaacttattcccctcctcttgatttcaggagatgtcagggtttttctattctggacaatgaatttggtacagagtcactgtaattaaatataaaaacagaagcatcttcctccagctaaagcagcagttggcgcgggcttaggttgaatgctggcctctctgcaaagcacagctttggctcgagaggcacagctccaggctgtggaaaacagagttgtcttgggggttaaatgagcttatttaagtcaaggaaacatcatctgtccttgattcagccttggtgcctgcactctggggtacaaccacctcacagtaggatggtttttaaatggccccccagttgggggagaagctaaggaaagagaaggctgcagatccaaagagtggcattgaagtttgctgggtgtctgtaggtggaccctttccagctgggcagatagttgagggctccctgggtttgactgtatgtgcagactttgataccaaaatgttatgaaaagtcgtgattcccgctgctctttctggtactggagggtgggtaccttcaggctgtggggtctctagcctgatattccattgaaagggtgtgggataaaggtgctgggggaaatgaggctctgccacagccatagagaggccctcgggcagttaagaagggagcctggagctgttttcatgagcagagatactctcctgaaagcacccttcatagcttagcccaggaaaaataaaacaaggaagacaggtcactctcccctaggcagttcctgttgtttctgttcctgaccttgggcaggcagactgagaagggactgtgtagggttttgttttgttttttttcattttcctttttatggcatgtgagagcatactgtacattctgtcctctgtactaatggaggaagggcagagagattagttcaaggctaacattttatatcaggtaactgaggcacacaaagggaacaaatgaagaacataaaatgatcagtgtaaacctgaaagcacgcagtcattggcaagggacaggctcatgggagctggtgagagagagcagttaaggcaagcaccaggggaaagcagaccaacttgaacagatgtgatgcggagaggttggaagaagcaagaaacctgaactcatcatcaggctattaaataaaatttataggaggctgttggtttggactgagctcctgcaataggcccaacagaccaaaacaaaagggagtcactcatgttgaagttctgtcttccaggaaatcaggagagagagagagagaaagaatagccaaatccccaaacaggccagttttaaccagcatgatgaagtgtccttggttttaacctttataaggaaagcagctttgagatgaccagtctggtttttgttctttgtgtctgctttcctcagcccttttctgtctataaagccaacctcctccgctcagctcatgggaacactcattctattttatagaatgacatgttgcccaattctagaatcaaaaataaaggccaactaagatcttcaaagtaaatttgttgtaattttatcttttgagaagaccatatgggggctgctgaaaagttggtatctcaaataaagtctgaagatcacggctcagcccagattgttcccctggccaactccacaggtttgaacctggcattctggacaccagctatgcctcctccatttctcagaaaacctttgatcttgtgtgtctttcttcctactgaagggaattgtgggggcagttctttggccttcttgctgaactttgctggaaatagcccacaatttttatcagaggttagaactgtacattatcagagagactggacactttatcccctagcaaagtgggagaagattttaccagctcattccactccaccctggccttcccccaccccccatccccagcagcatttccatggaaatccagatggtcgtgtagtgttatggctctcttgtgatagactggccttcatattggagagctagggagagcccctgggagggagagagataaggcgctatctgccttcaatcagaaccttcggtttaaaatcatctaagagtctatacttgtgtgtacatacgtatttatttttatttatttttatacaattccattggcatggtccttcaccgaccctatgatttgcactttttatttctatgtgtgccacacacaatgcagtattaatggcaaccaggtaaatattgatttattttttaaagcttttcttcagtgttttgtcaaccatttcaaagtgtctcccaaaaaaggatgctgaagagcaattgctcccttaagcaacagattcatatttaccctgggttaatacaacaaaaggcctgtataattgtcttttcattgttaacacccaaaatagcatctatctagacagtatccccaaagaatttggaaaatctgatggtgtgagcagcagccgttagtatcagggtttcccattcttggacagtccgaggctgtgacctgttagataattagattatacttgaactggaccagagtttgttttttgaatttatgagaaaaaccaaaacactaagttaagtttgaacttgtaaagtattgaaatttgttgagtgtcctataaattgtcactacttttcctgatctgtataactgactgcaaagtgtttgtttttacaaaagagaaaagaaaagatttttaataaagagaatttgaaagctgt

SEQ ID NO: 4392 - DNA, 7233 bp, Homo sapiens
  source 1..7233: mol_type = genomic DNA
ccgggaccgcccctcccttgagctctctcgccgcgatcccgggcgggtctcgccccgcatggtgctggcagcagccatgagccaggacgcggaccccagcggtccggagcagccggacagagttgcctgcagtgtgcctggtgcccgggcgtccccggcaccctccggcccgcgagggatgcagcagccgccgccgccgccccagccaccgcccccgccccaagccggcctaccccagatcatccaaaatgccgccaagctcctggacaagaacccattctcggtcagtaacccgaaccctctgcttccttcacctgccagtctccagctggctcaactgcaggcccagctcaccctccaccggctgaagctggcacagacagctgtcaccaacaacactgcagccgccacagtcctgaaccaagtcctctccaaagtggccatgtcccagcctctcttcaatcaactgaggcatccgtctgtgatcactggcccccacggccatgctggggttccccaacatgctgcagccatacccagtacccggtttccctctaatgcaattgccttttcaccccccagccagacacgaggccccggaccctccatgaaccttcccaaccagccacccagtgccatggtgatgcatcctttcactggggtaatgcctcagacccctggccagccagcagtcatcttgggcattggcaagactgggcctgctccagctacagcaggattctatgagtatggcaaagccagctctggccagacatatggccctgaaacagatggtcagcctggcttcctgccatcctcggcctcaacctcgggcagtgtgacctatgaagggcactacagccacacagggcaggatggtcaagctgccttttccaaagatttttacggacccaactcccaaggttcacatgtggccagcggatttccagctgagcaggctgggggcctgaaaagtgaggtcgggccactgctgcagggcacaaacagccaatgggagagcccccatggattctcgggccaaagcaagcctgatctcacagcaggtcccatgtggcctccaccccacaaccagccctatgagctgtacgaccccgaggaaccaacctcagacaggacacctccttccttcgggggtcggcttaacaacagcaaacagggttttatcggtgctgggcggagggccaaggaggaccaggcgttgctatctgtgcggcccctgcaggctcatgagctgaacgactttcacggtgtggcccccctccacttgccgcatatctgtagcatctgtgacaagaaggtgtttgatttgaaggactgggagctgcatgtgaaagggaagctgcacgctcagaaatgcctggtcttctctgaaaatgctggcatccggtgtatacttggttcggcagagggaacattgtgtgcttctcccaacagcacagctgtttataaccctgctgggaatgaagattatgcctcaaatcttggaacatcatacgtgcccattccagcaaggtcattcactcagtcaagccccacatttcctttggcttctgtggggacaacttttgcacagcggaaaggggctggccgtgtggtgcacatctgcaatctccctgaaggaagctgcactgagaatgacgtcattaacctggggctgccctttggaaaggtcactaattacatcctcatgaagtcgactaatcaggcctttttagagatggcttacacagaagctgcacaggccatggtccagtattatcaagaaaaatctgctgtgatcaatggtgagaagttgctcattcggatgtccaagagatacaaggaattgcagctcaagaaacccgggaaggccgtggctgccatcatccaggacatccattcccagagggagagggacatgttccgggaagcagacagatatggcccagaaaggccgcggtctcgtagtccggtgagccggtcactctccccgaggtcccacactcccagcttcacctcctgcagctcttcccacagccctccgggcccctcccgggctgactggggcaatggccgggactcctgggagcactctccctatgccaggagggaggaagagcgagacccggctccctggagggacaacggagatgacaagagggacaggatggacccctgggcacatgatcgcaaacaccacccccggcaactggacaaggctgagttggacgagcgaccagaaggagggaggccccaccgggagaagtacccgagatctgggtctcccaacctgccccactctgtgtccagctacaaaagccgtgaagacggctactaccggaaagagcccaaagccaagtgggacaagtatctgaagcagcagcaggatgcccccgggaggtccaggaggaaagacgaggccaggctgcgggaaagcagacacccccatccggatgactcaggcaaggaagatgggctggggccaaaggtcactagggcccctgagggcgccaaggccaagcagaatgagaaaaataaaaccaagagaactgatagagaccaagaaggagctgatgatagaaaagaaaacacaatggcagagaatgaggctggaaaagaggaacaggagggcatggaagaaagccctcaatcagtgggcagacaggagaaagaagcagagttctctgatccggaaaacacaaggacaaagaaggaacaagattgggagagtgaaagtgaggcagagggggagagctggtatcccactaacatggaggagctggtgacagtggacgaggttggggaagaagaagattttatcgtggaaccagacatcccagagctggaagaaattgtgcccattgaccagaaagacaaaatttgcccagaaacatgtctgtgtgtgacaaccaccttagacttagacctggcccaggatttccccaaggaaggagtcaaggccgtagggaatggggctgcagaaatcagcctcaagtcacccagagaactgccctctgcttccacaagctgtcccagtgacatggacgtggaaatgcctggcctaaatctggatgctgagcggaagccagctgaaagtgagacaggcctctccctggaggattcagattgctacgagaaggaggcaaagggagtggagagctcagatgttcatccagcccctacagtccagcaaatgtcttcccctaagccagcagaggagagggcccggcagccaagcccatttgtggatgattgcaagaccagggggacccccgaagatggggcttgtgaaggcagccccctggaggagaaagccagcccccccatcgaaactgacctccaaaaccaagcttgccaagaagtgttgaccccggaaaactccaggtacgtggaaatgaaatctctggaggtgaggtcaccagagtacactgaagtggaactgaaacagcccctttctttgccctcttgggaaccagaggatgtgttcagtgaacttagcattcctctaggggtggagttcgtggttcccaggactggcttttattgcaagctgtgtgggctgttctacacgagcgaggagacagcaaagatgagccactgccgcagcgctgtccactacaggaacttacagaaatatttgtcccagctggccgaggagggcctcaaggagaccgagggggcagatagcccgaggccagaggacagcggaatcgtgccacgcttcgaaaggaaaaagctctgatgcttctgcttctgctgctactgctgctgctgcaaggttggaaaggagagcttgctgaagtggggccttcctgattctggggacaggactaaagcctgagaggaaggaaaaccaagcagggcacattgcttgggcttgttcccagagactcagtgaaatgcccctgatatgtctccaggagcaagtcacccaggtgtgtccagcccactgagggtcaccaactctctccctgctgactcttgtttctctcaatctttcaattcgtttttctctcttttcctcttgttctttctctccctccctccttatgtgccaaggatcgtttccttttcacaaaacccaacttctcagggattttcacagtgtttaaattcttggtaggatataacaggtcaggcctagctgagtcaggcaaggaaaaggtttaatggaaactcctgggtcaggcgaacccctgcagtgagtctacagcagtatctctgcctggtgtcccatgtatcccctgcatgaggagctgagtcaggtctgcagtcctggtgaggggacatcacggacaatctgttggcagagctgggagggtcttcattaacctcttcctccaactgggccacccttttgaaaagcccctgtttttaataactgtttcatcctctcagttattctagaaatctgccagacttatgccttaaagtaaaattaaatgaattttagagaagatgaaaagagcccttcattttggaagctctgataagtttcctccaaacttattcccctcctcttgatttcaggagatgtcagggtttttctattctggacaatgaatttggtacagagtcactgtaattaaatataaaaacagaagcatcttcctccagctaaagcagcagttggcgcgggcttaggttgaatgctggcctctctgcaaagcacagctttggctcgagaggcacagctccaggctgtggaaaacagagttgtcttgggggttaaatgagcttatttaagtcaaggaaacatcatctgtccttgattcagccttggtgcctgcactctggggtacaaccacctcacagtaggatggtttttaaatggccccccagttgggggagaagctaaggaaagagaaggctgcagatccaaagagtggcattgaagtttgctgggtgtctgtaggtggaccctttccagctgggcagatagttgagggctccctgggtttgactgtatgtgcagactttgataccaaaatgttatgaaaagtcgtgattcccgctgctctttctggtactggagggtgggtaccttcaggctgtggggtctctagcctgatattccattgaaagggtgtgggataaaggtgctgggggaaatgaggctctgccacagccatagagaggccctcgggcagttaagaagggagcctggagctgttttcatgagcagagatactctcctgaaagcacccttcatagcttagcccaggaaaaataaaacaaggaagacaggtcactctcccctaggcagttcctgttgtttctgttcctgaccttgggcaggcagactgagaagggactgtgtagggttttgttttgttttttttcattttcctttttatggcatgtgagagcatactgtacattctgtcctctgtactaatggaggaagggcagagagattagttcaaggctaacattttatatcaggtaactgaggcacacaaagggaacaaatgaagaacataaaatgatcagtgtaaacctgaaagcacgcagtcattggcaagggacaggctcatgggagctggtgagagagagcagttaaggcaagcaccaggggaaagcagaccaacttgaacagatgtgatgcggagaggttggaagaagcaagaaacctgaactcatcatcaggctattaaataaaatttataggaggctgttggtttggactgagctcctgcaataggcccaacagaccaaaacaaaagggagtcactcatgttgaagttctgtcttccaggaaatcaggagagagagagagagaaagaatagccaaatccccaaacaggccagttttaaccagcatgatgaagtgtccttggttttaacctttataaggaaagcagctttgagatgaccagtctggtttttgttctttgtgtctgctttcctcagcccttttctgtctataaagccaacctcctccgctcagctcatgggaacactcattctattttatagaatgacatgttgcccaattctagaatcaaaaataaaggccaactaagatcttcaaagtaaatttgttgtaattttatcttttgagaagaccatatgggggctgctgaaaagttggtatctcaaataaagtctgaagatcacggctcagcccagattgttcccctggccaactccacaggtttgaacctggcattctggacaccagctatgcctcctccatttctcagaaaacctttgatcttgtgtgtctttcttcctactgaagggaattgtgggggcagttctttggccttcttgctgaactttgctggaaatagcccacaatttttatcagaggttagaactgtacattatcagagagactggacactttatcccctagcaaagtgggagaagattttaccagctcattccactccaccctggccttcccccaccccccatccccagcagcatttccatggaaatccagatggtcgtgtagtgttatggctctcttgtgatagactggccttcatattggagagctagggagagcccctgggagggagagagataaggcgctatctgccttcaatcagaaccttcggtttaaaatcatctaagagtctatacttgtgtgtacatacgtatttatttttatttatttttatacaattccattggcatggtccttcaccgaccctatgatttgcactttttatttctatgtgtgccacacacaatgcagtattaatggcaaccaggtaaatattgatttattttttaaagcttttcttcagtgttttgtcaaccatttcaaagtgtctcccaaaaaaggatgctgaagagcaattgctcccttaagcaacagattcatatttaccctgggttaatacaacaaaaggcctgtataattgtcttttcattgttaacacccaaaatagcatctatctagacagtatccccaaagaatttggaaaatctgatggtgtgagcagcagccgttagtatcagggtttcccattcttggacagtccgaggctgtgacctgttagataattagattatacttgaactggaccagagtttgttttttgaatttatgagaaaaaccaaaacactaagttaagtttgaacttgtaaagtattgaaatttgttgagtgtcctataaattgtcactacttttcctgatctgtataactgactgcaaagtgtttgtttttacaaaagagaaaagaaaagatttttaataaagagaatttgaaagctgt

SEQ ID NO: 4393 - DNA, 1386 bp, Homo sapiens
  source 1..1386: mol_type = genomic DNA
caattcggaagctacagctacctccggacgctctcaagatggcgacctctctgggttccaacacctacaacaggcagaactgggaggatgcggacttccccattctgtgccagacatgtcttggagaaaacccatatatccgaatgaccaaagaaaagtatggcctgcccatccaggttcgtgacgcaggattgtcttttaaagatgacatgccaaagtcagatgtcaacaaagagtactatacacagaatatggagagagagatttctaactctgatggaacacggccagttggcatgctggggaaagccacatctaccagtgacatgctgctcaaactggcccggaccacaccctactacaaaaggaatcgaccccacatttgctccttctgggtgaaaggagagtgtaagagaggagaggaatgtccatacagacatgagaagcctacagatccagatgacccccttgctgatcagaatattaaagaccgttattacggaatcaatgatcctgtagctgacaagcttctaaagcgggcttcaacaatgcctcggctggacccaccagaggataaaactatcaccacactatatgttggtggtctaggtgataccattactgagacagatttaagaaatcatttctaccagttcggagagatccggacgatcactgttgtgcagagacagcagtgtgctttcatccagtttgccacacggcaggctgcagaagtggctgctgagaagtcctttaataagttgattgtaaatggccgcagactgaatgtgaaatggggaagatcccaggcagccagaggaaaagaaaaagagaaagatggaactacagactctgggatcaaactagaacctgttccaggattgccaggagctcttcctcctcctcctgcagcagaagaagaagcctctgccaactacttcaacttgcccccaagtggtcctccagctgtggtgaacattgctctgccaccgccccctggcattgctccacccccacccccaggttttgggccacacatgttccacccaatgggaccaccccctcctttcatgcgggctccaggaccaatccactatccttctcaggaccctcagaggatgggagctcatgctggaaaacacagcagcccctagcaccttgtcaccactctggggctctgtggaagaaagggcacttaaaactcccagtaaatcttggaataaatatatttttccttcccttgtagtttccatggtagctgaatgtgctcagatgtgagcagtcagagactgacagccatgctttcctatacttgttcaaaggatcgatggaccgtaaataagctgccattaacacatctggttactgctgtaacatgactaataa

SEQ ID NO: 4394 - DNA, 2342 bp, Homo sapiens
  source 1..2342: mol_type = genomic DNA
aagaagccctagacgcgtaaataagacgccgaccggcgcggcgctagcctcggggcttgacgggattgtggcggtcctctctcccaattcggaagctacagctacctccggacgctctcaagatggcgacctctctgggttccaacacctacaacaggcagaactgggaggatgcggacttccccattctgtgccagacatgtcttggagaaaacccatatatccgaatgaccaaagaaaagtatgggaaggaatgcaaaatctgtgccaggccattcacagtgtttcgctggtgccctggagtccgcatgcgtttcaagaagactgaagtgtgccaaacctgcagtaaattgaagaatgtctgtcagacctgcctcttagacctagagtatggcctgcccatccaggttcgtgacgcaggattgtcttttaaagatgacatgccaaagtcagatgtcaacaaagagtactatacacagaatatggagagagagatttctaactctgatggaacacggccagttggcatgctggggaaagccacatctaccagtgacatgctgctcaaactggcccggaccacaccctactacaaaaggaatcgaccccacatttgctccttctgggtgaaaggagagtgtaagagaggagaggaatgtccatacagacatgagaagcctacagatccagatgacccccttgctgatcagaatattaaagaccgttattacggaatcaatgatcctgtagctgacaagcttctaaagcgggcttcaacaatgcctcggctggacccaccagaggataaaactatcaccacactatatgttggtggtctaggtgataccattactgagacagatttaagaaatcatttctaccagttcggagagatccggacgatcactgttgtgcagagacagcagtgtgctttcatccagtttgccacacggcaggctgcagaagtggctgctgagaagtcctttaataagttgattgtaaatggccgcagactgaatgtgaaatggggaagatcccaggcagccagaggaaaagaaaaagagaaagatggaactacagactctgggatcaaactagaacctgttccaggattgccaggagctcttcctcctcctcctgcagcagaagaagaagcctctgccaactacttcaacttgcccccaagtggtcctccagctgtggtgaacattgctctgccaccgccccctggcattgctccacccccacccccaggttttgggccacacatgttccacccaatgggaccaccccctcctttcatgcgggctccaggaccaatccactatccttctcaggaccctcagaggatgggagctcatgctggaaaacacagcagcccctagcaccttgtcaccactctggggctctgtggaagaaagggcacttaaaactcccagtaaatcttggaataaatatatttttccttcccttgtagtttccatggtagctgaatgtgctcagatgtgagcagtcagagactgacagccatgctttcctatacttgttcaaaggatcgatggaccgtaaataagctgccattaacacatctggttactgctgtaacatgactaataaaaccgaacgcctgttccccttacccgtgtgggggacacgcagatgagtgaattggaatgtccagcagagttaccctcccaattatatgttcattttgtatattttttggtcgggggaaaaattgacctgcagtaaaaaaacctttgaccatttttatgtccattggatactttcctttttatcatcttaaaaaaagataactagtactaatcattgtagtggcctaagtgtgatttaactcttgaagtcacaccctccgaaagatgagtagaaaccagcaccagcacagcccagatcttctctttcctctccttttcctcatttattcctaaaggaatctgaccattttacgtctctacggcccaaaaaaagacaaaaataaaaattcctttttattcctgtcaactggatggaaacacaaatttcatggagctgtgtaccatcgaagaaacctggtgtctggcatgaaattactgtaaagaacttcctgtaaaacacgttctttaacaaactgaaatgaaaagcattggagcgtctgaatgaaagacgtgacctcctgctgggactctgatggtcttcagcattcaccttcgtgtgtcttcagtgtctcattgtcatccctgcttctgtttggtcttagagtgtttggatataactgaattgtagatggtaaaggaaatttgatgtgttttttgtttttaaataattaaaacgggtcaattttt

SEQ ID NO: 4395 - DNA, 2128 bp, Homo sapiens
  source 1..2128: mol_type = genomic DNA
gtggcggtcctctctcccaattcggaagctacagctacctccggacgctctcaagatggcgacctctctgggttccaacacctacaacaggcagaactgggaggatgcggacttccccattctgtgccagacatgtcttggagaaaacccatatatccgaatggaaagggaaaaatcaggcctgcccatccaggttcgtgacgcaggattgtcttttaaagatgacatgccaaagtcagatgtcaacaaagagtactatacacagaatatggagagagagatttctaactctgatggaacacggccagttggcatgctggggaaagccacatctaccagtgacatgctgctcaaactggcccggaccacaccctactacaaaaggaatcgaccccacatttgctccttctgggtgaaaggagagtgtaagagaggagaggaatgtccatacagacatgagaagcctacagatccagatgacccccttgctgatcagaatattaaagaccgttattacggaatcaatgatcctgtagctgacaagcttctaaagcgggcttcaacaatgcctcggctggacccaccagaggataaaactatcaccacactatatgttggtggtctaggtgataccattactgagacagatttaagaaatcatttctaccagttcggagagatccggacgatcactgttgtgcagagacagcagtgtgctttcatccagtttgccacacggcaggctgcagaagtggctgctgagaagtcctttaataagttgattgtaaatggccgcagactgaatgtgaaatggggaagatcccaggcagccagaggaaaagaaaaagagaaagatggaactacagactctgggatcaaactagaacctgttccaggattgccaggagctcttcctcctcctcctgcagcagaagaagaagcctctgccaactacttcaacttgcccccaagtggtcctccagctgtggtgaacattgctctgccaccgccccctggcattgctccacccccacccccaggttttgggccacacatgttccacccaatgggaccaccccctcctttcatgcgggctccaggaccaatccactatccttctcaggaccctcagaggatgggagctcatgctggaaaacacagcagcccctagcaccttgtcaccactctggggctctgtggaagaaagggcacttaaaactcccagtaaatcttggaataaatatatttttccttcccttgtagtttccatggtagctgaatgtgctcagatgtgagcagtcagagactgacagccatgctttcctatacttgttcaaaggatcgatggaccgtaaataagctgccattaacacatctggttactgctgtaacatgactaataaaaccgaacgcctgttccccttacccgtgtgggggacacgcagatgagtgaattggaatgtccagcagagttaccctcccaattatatgttcattttgtatattttttggtcgggggaaaaattgacctgcagtaaaaaaacctttgaccatttttatgtccattggatactttcctttttatcatcttaaaaaaagataactagtactaatcattgtagtggcctaagtgtgatttaactcttgaagtcacaccctccgaaagatgagtagaaaccagcaccagcacagcccagatcttctctttcctctccttttcctcatttattcctaaaggaatctgaccattttacgtctctacggcccaaaaaaagacaaaaataaaaattcctttttattcctgtcaactggatggaaacacaaatttcatggagctgtgtaccatcgaagaaacctggtgtctggcatgaaattactgtaaagaacttcctgtaaaacacgttctttaacaaactgaaatgaaaagcattggagcgtctgaatgaaagacgtgacctcctgctgggactctgatggtcttcagcattcaccttcgtgtgtcttcagtgtctcattgtcatccctgcttctgtttggtcttagagtgtttggatataactgaattgtagatggtaaaggaaatttgatgtgttttttgtttttaaataattaaaacgggtcaattttt

SEQ ID NO: 4396 - DNA, 2430 bp, Homo sapiens
  source 1..2430: mol_type = genomic DNA
atgcgcagattggggaaggttctggaagacggcagagctgccgccattttgcgggaagaggaggctctgtacctgcagtgctgcttttcttgcctagactctaggaactatccgagctccactccccacaacatactcaaaggaacggagagaaccgggacccccctgcggggacccggaactgatctgacaggatggcatctgatgactttgacatagtgattgaggccatgctggaagctccctataaaaaagaagaggatgagcaacaaaggaaagaagttaaaaaggattatcctagcaataccaccagcagcaccagcaacagtggcaatgagaccagtggaagcagcaccatcggggagacaagcaatcgtagtcgagatcgggatcggtatagacggagaaatagtcggagccgaagtccaggtcggcagtgtcgtcaccgtagccgtagctgggatcgtcgacatggtagtgagtcgcgaagtcgggaccatcgtcgtgaggatcgtgtgcattacaggagtcctccacttgccactggttataggtatggacacagtaagagtcctcatttcagagagaagagcccagtcagggagccagttgataatctgagtcctgaggagcgtgatgcccgcacagttttctgtatgcagttagctgcccgaattcggcctcgagatctggaggactttttctctgctgtaggcaaggttcgcgatgtacgtatcatctcagatcggaactcacgtcgttctaagggcattgcctacgtggaattctgtgaaatccagtctgtgccactggccattgggctgactgggcagcggttgctgggagtgcctatcattgtacaggcttcacaggcagagaaaaaccgactggcagccatggccaacaacctgcaaaagggcaatggtggaccaatgcgcctctatgtgggttccctgcacttcaatatcactgaagacatgctccggggcatctttgagccctttggtaaaattgataatattgtcctgatgaaggactcagatacaggccgctctaaaggttatggtttcatcacgttctctgattctgagtgtgcccggcgggccctggaacagttgaatgggtttgagcttgctggtcgacctatgagggttggccatgtgactgagcgactggatggtggcacagacatcacttttcctgatggggaccaggagctggatctgggatcagcaggtggacgttttcagctcatggcaaaactggcagaaggcgctggaatccaactgccaagcactgctgctgctgctgctgccgccgccgcccaggctgctgccttgcaactgaatggagcagttcccttgggggccctgaatccagcagctctgactgctctgagtccagccctgaaccttgcctcccagtgtttccagctctccagcctctttaccccccagaccatgtaaatcagtggcacagtatactgcctccttgtgcctctggatcctgccacttcacatctactcttccatggccccatttctccattttgtggaccaagccatcctgagggcatggacattgtctctgaggaaattggggccacccttaagataccaagaaaagctcctgcccatggtcccactggaaatggactctgctgagcaaagccaccagttgaagagaacagaatccacacctgcattgaatacctgtttctccatgtgtatcgtctctgagattaccttcttgccctttccaacaccttagtgattcctcaatttctcccccattgggaaggccatagggcatactgaaggaactgacctctctccttttcctgtacctttaacctttagtctgtcaaggaaaacccttaggacctctgaatcaagaggactgagtttgtgggtgaaccttgaaggtgctctttctgctacaagggccctgggagatagcatggacgtgcattgagaagccagcctcagaccttagcttgaagcagcttgaggccagacctactgtagcctcagcatcttgctaggaggcatggaagtgatctatcctgccaggaggcctcagagtgatctgtcctgccaggaggtgtgagagtgatctgtcctgtgaggcatttaggggctttcaggaatttagtaaaaggtggagtatgcctttccagtatcttccatcttcctttgtatacttgtccttcctcccatttcctccctttggcccgaggtaggaggatggagggaggctgctactctaccacttcctgtgtgcctctactgtggcctcaaccctggcaattatagctactcccatcccttacctgggcatgtgtgagcccttctcactggattttatacccttgtgtctgtgtacataaatatatatacatatatatatacataaaaactttgtacaaaa

SEQ ID NO: 4397 - DNA, 2601 bp, Homo sapiens
  source 1..2601: mol_type = genomic DNA
gcatgcgcagattggggaaggttctggaagacggcagagctgccgccattttgcgggaagaggaggctctgtacctgcagtgctgcttttcttgcctagactctaggaactatccgagctccactccccacaacatactcaaaggaacggagagaaccgggacccccctgcggggacccggaactgatctgacaggatggcatctgatgactttgacatagtgattgaggccatgctggaagctccctataaaaaagaagaggatgagcaacaaaggaaagaagttaaaaaggattatcctagcaataccaccagcagcaccagcaacagtggcaatgagaccagtggaagcagcaccatcggggagacaagcaagaagaagaggagtcggagccataataaaagcagggatagaaagcgcagtcgtagtcgagatcgggatcggtatagacggagaaatagtcggagccgaagtccaggtcggcagtgtcgtcaccgtagccgtagctgggatcgtcgacatggtagtgagtcgcgaagtcgggaccatcgtcgtgaggatcgtgtgcattacaggagtcctccacttgccactggttataggtatggacacagtaagagtcctcatttcagagagaagagcccagtcagggagccagttgataatctgagtcctgaggagcgtgatgcccgcacagttttctgtatgcagttagctgcccgaattcggcctcgagatctggaggactttttctctgctgtaggcaaggttcgcgatgtacgtatcatctcagatcggaactcacgtcgttctaagggcattgcctacgtggaattctgtgaaatccagtctgtgccactggccattgggctgactgggcagcggttgctgggagtgcctatcattgtacaggcttcacaggcagagaaaaaccgactggcagccatggccaacaacctgcaaaagggcaatggtggaccaatgcgcctctatgtgggttccctgcacttcaatatcactgaagacatgctccggggcatctttgagccctttggtaaaattgataatattgtcctgatgaaggactcagatacaggccgctctaaaggttatggtttcatcacgttctctgattctgagtgtgcccggcgggccctggaacagttgaatgggtttgagcttgctggtcgacctatgagggttggccatgtgactgagcgactggatggtggcacagacatcacttttcctgatggggaccaggagctggatctgggatcagcaggtggacgttttcagctcatggcaaaactggcagaaggcgctggaatccaactgccaagcactgctgctgctgctgctgccgccgccgcccaggctgctgccttgcaactgaatggagcagttcccttgggggccctgaatccagcagctctgactgctctgagtccagccctgaaccttgcctcccagtgtttccagctctccagcctctttaccccccagaccatgtaaatcagtggcacagtatactgcctccttgtgcctctggatcctgccacttcacatctactcttccatggccccatttctccattttgtggaccaagccatcctgagggcatggacattgtctctgaggaaattggggccacccttaagataccaagaaaagctcctgcccatggtcccactggaaatggactctgctgagcaaagccaccagttgaagagaacagaatccacacctgcattgaatacctgtttctccatgtgtatcgtctctgagattaccttcttgccctttccaacaccttagtgattcctcaatttctcccccattgggaaggccatagggcatactgaaggaactgacctctctccttttcctgtacctttaacctttagtctgtcaaggaaaacccttaggacctctgaatcaagaggactgagtttgtgggtgaaccttgaaggtgctctttctgctacaagggccctgggagatagcatggacgtgcattgagaagccagcctcagaccttagcttgaagcagcttgaggccagacctactgtagcctcagcatcttgctaggaggcatggaagtgatctatcctgccaggaggcctcagagtgatctgtcctgccaggaggtgtgagagtgatctgtcctgtgaggcatttaggggctttcaggaatttagtaaaaggtggagtatgcctttccagtatcttccatcttcctttgtatacttgtccttcctcccatttcctccctttggcccgaggtaggaggatggagggaggctgctactctaccacttcctgtgtgcctctactgtggcctcaaccctggcaattatagctactcccatcccttacctgggcatgtgtgagcccttctcactggattttatacccttgtgtctgtgtacataaatatatatacatatatatatacataaaaactttgtacaaaaggcaagcctcctccttgtggcagctgttgcccatttgtgtgtggtctttgttgtgtgtctgacaacttctcattagcccaacttatgatgtttctagggatataaaacattagtaacatca

SEQ ID NO: 4398 - DNA, 2361 bp, Homo sapiens
  source 1..2361: mol_type = genomic DNA
gcagattggggaaggttctggaagacggcagagctgccgccattttgcgggaagaggaggctctgtacctgcagtgctgcttttcttgcctagactctaggaactatccgagctccactccccacaacatactcaaaggaacggagagaaccgggacccccctgcggggacccggaactgatctgacaggatggcatctgatgactttgacatagtgattgaggccatgctggaagctccctataaaaaagaagaggatgagcaacaaaggaaagaagttaaaaaggattatcctagcaataccaccagcagcaccagcaacagtggcaatgagaccagtggaagcagcaccatcggggagacaagcaatcgtagtcgagatcgggatcggtatagacggagaaatagtcggagccgaagtccaggtcggcagtgtcgtcaccgtagccgtagctgggatcgtcgacatggtagtgagtcgcgaagtcgggaccatcgtcgtgaggatcgtgtgcattacaggagtcctccacttgccactggggagccagttgataatctgagtcctgaggagcgtgatgcccgcacagttttctgtatgcagttagctgcccgaattcggcctcgagatctggaggactttttctctgctgtaggcaaggttcgcgatgtacgtatcatctcagatcggaactcacgtcgttctaagggcattgcctacgtggaattctgtgaaatccagtctgtgccactggccattgggctgactgggcagcggttgctgggagtgcctatcattgtacaggcttcacaggcagagaaaaaccgactggcagccatggccaacaacctgcaaaagggcaatggtggaccaatgcgcctctatgtgggttccctgcacttcaatatcactgaagacatgctccggggcatctttgagccctttggtaaaattgataatattgtcctgatgaaggactcagatacaggccgctctaaaggttatggtttcatcacgttctctgattctgagtgtgcccggcgggccctggaacagttgaatgggtttgagcttgctggtcgacctatgagggttggccatgtgactgagcgactggatggtggcacagacatcacttttcctgatggggaccaggagctggatctgggatcagcaggtggacgttttcagctcatggcaaaactggcagaaggcgctggaatccaactgccaagcactgctgctgctgctgctgccgccgccgcccaggctgctgccttgcaactgaatggagcagttcccttgggggccctgaatccagcagctctgactgctctgagtccagccctgaaccttgcctcccagtgtttccagctctccagcctctttaccccccagaccatgtaaatcagtggcacagtatactgcctccttgtgcctctggatcctgccacttcacatctactcttccatggccccatttctccattttgtggaccaagccatcctgagggcatggacattgtctctgaggaaattggggccacccttaagataccaagaaaagctcctgcccatggtcccactggaaatggactctgctgagcaaagccaccagttgaagagaacagaatccacacctgcattgaatacctgtttctccatgtgtatcgtctctgagattaccttcttgccctttccaacaccttagtgattcctcaatttctcccccattgggaaggccatagggcatactgaaggaactgacctctctccttttcctgtacctttaacctttagtctgtcaaggaaaacccttaggacctctgaatcaagaggactgagtttgtgggtgaaccttgaaggtgctctttctgctacaagggccctgggagatagcatggacgtgcattgagaagccagcctcagaccttagcttgaagcagcttgaggccagacctactgtagcctcagcatcttgctaggaggcatggaagtgatctatcctgccaggaggcctcagagtgatctgtcctgccaggaggtgtgagagtgatctgtcctgtgaggcatttaggggctttcaggaatttagtaaaaggtggagtatgcctttccagtatcttccatcttcctttgtatacttgtccttcctcccatttcctccctttggcccgaggtaggaggatggagggaggctgctactctaccacttcctgtgtgcctctactgtggcctcaaccctggcaattatagctactcccatcccttacctgggcatgtgtgagcccttctcactggattttatacccttgtgtctgtgtacataaatatatatacatatatatatacataaaaac

SEQ ID NO: 4399 - DNA, 588 bp, Homo sapiens
  source 1..588: mol_type = genomic DNA
agagctgccgccattttgcgggaagaggaggctctgtacctgcagtgctgcttttcttgcctagactctaggaactatccgagctccactccccacaacatactcaaaggaacggagagaaccgggacccccctgcggggacccggaactgagtcttggtctgtcacccaacctggagtgcaatggtgccatctcggctggctgcaacttccgcctcccgggttcaagcaattctcctgtctcagcctcccaggctggagcacagtggcgcgttctcggctcattgcaacctccacctcctgggttcaagcagttcttatgccacagccttccaagcagctgggactacagatctgacaggatggcatctgatgactttgacatagtgattgaggccatgctggaagctccctataaaaaagaagaggatgagcaacaaaggaaagaagttaaaaaggattatcctagcaataccaccagcagcaccagcaacagtggcaatgagaccagtggaagcagcaccatcggggagacaagcaagaagaagaggagtcggagccataataaaagcagggatagaaagcgcag

SEQ ID NO: 4400 - DNA, 268 bp, Homo sapiens
  source 1..268: mol_type = genomic DNA
gaaaaaactaccagcctgaaaatgcatagtgtttgctaccttattgcttttagcacatctagaaagacactaaacccaatctgacaggatggcatctgatgactttgacatagtgattgaggccatgctggaagctccctataaaaaagaagaggatgagcaacaaaggaaagaagttaaaaaggattatcctagcaataccaccagcagcaccagcaacagtggcaatgagaccagtggaagcagcaccatcggggagacaagcaag

SEQ ID NO: 4401 - DNA, 573 bp, Homo sapiens
  source 1..573: mol_type = genomic DNA
agagctgccgccattttgcgggaagaggaggctctgtacctgcagtgctgcttttcttgcctagactctaggaactatccgagctccactccccacaacatactcaaaggaacggagagaaccgggacccccctgcggggacccggaactggccgggctcggtggctcatgtctgtaatcccagccctttgggaggaccaggcaggcggatcacctgaggtcaggagttcgagaccagcctgaccaatgtggagaaaccccgtctctgctaaaaatacaacattagccagatctgacaggatggcatctgatgactttgacatagtgattgaggccatgctggaagctccctataaaaaagaagaggatgagcaacaaaggaaagaagttaaaaaggattatcctagcaataccaccagcagcaccagcaacagtggcaatgagaccagtggaagcagcaccatcggggagacaagcaatcgtagtcgagatcgggatcggtatagacggagaaatagtcggagccgaagtccaggtcggcagtgtcgtcaccgtagccgtagctgggatcgt

SEQ ID NO: 4402 - DNA, 582 bp, Homo sapiens
  source 1..582: mol_type = genomic DNA
agagctgccgccattttgcgggaagaggaggctctgtacctgcagtgctgcttttcttgcctagactctaggaactatccgagctccactccccacaacatactcaaaggaacggagagaaccgggacccccctgcggggacccggaactgggtcacacattgctgcccaggctggagtacagtggcgtgatcttggctcactgcaacctccaccttttgggttcaagtgattctcctgcctcagcctcctgagtagctgggattacagatctgacaggatggcatctgatgactttgacatagtgattgaggccatgctggaagctccctataaaaaagaagaggatgagcaacaaaggaaagaagttaaaaaggattatcctagcaataccaccagcagcaccagcaacagtggcaatgagaccagtggaagcagcaccatcggggagacaagcaatcgtagtcgagatcgggatcggtatagacggagaaatagtcggagccgaagtccaggtcggcagtgtcgtcaccgtagccgtagctgggatcgtcgacatggtagtgagtcgcgaagtcgggac

SEQ ID NO: 4403 - DNA, 2601 bp, Homo sapiens
  source 1..2601: mol_type = genomic DNA
ggcgcatgcgcagattggggaaggttctggaagacggcagagctgccgccattttgcgggaagaggaggctctgtacctgcagtgctgcttttcttgcctagactctaggaactatccgagctccactccccacaacatactcaaaggaacggagagaaccgggacccccctgcggggacccggaactgatctgacaggatggcatctgatgactttgacatagtgattgaggccatgctggaagctccctataaaaaagaagaggatgagcaacaaaggaaagaagttaaaaaggattatcctagcaataccaccagcagcaccagcaacagtggcaatgagaccagtggaagcagcaccatcggggagacaagcaagaagaagaggagtcggagccataataaaagcagggatagaaagcgcagtcgtagtcgagatcgggatcggtatagacggagaaatagtcggagccgaagtccaggtcggcagtgtcgtccgtagccgtagctgggatcgtcgacatggtagtgagtcgcgaagtcgggaccatcgtcgtgaggatcgtgtgcattacaggagtcctccacttgccactggttataggtatggacacagtaagagtcctcatttcagagagaagagcccagtcagggagccagttgataatctgagtcctgaggagcgtgatgcccgcacagttttctgtatgcagttagctgcccgaattcggcctcgagatctggaggactttttctctgctgtaggcaaggttcgcgatgtacgtatcatctcagatcggaactcacgtcgttctaagggcattgcctacgtggaattctgtgaaatccagtctgtgccactggccattgggctgactgggcagcggttgctgggagtgcctatcattgtacaggcttcacaggcagagaaaaaccgactggcagccatggccaacaacctgcaaaagggcaatggtggaccaatgcgcctctatgtgggttccctgcacttcaatatcactgaagacatgctccggggcatctttgagccctttggtaaaattgataatattgtcctgatgaaggactcagatacaggccgctctaaaggttatggtttcatcacgttctctgattctgagtgtgcccggcgggccctggaacagttgaatgggtttgagcttgctggtcgacctatgagggttggccatgtgactgagcgactggatggtggcacagacatcacttttcctgatggggaccaggagctggatctgggatcagcaggtggacgttttcagctcatggcaaaactggcagaaggcgctggaatccaactgccaagcactgctgctgctgctgctgccgccgccgcccaggctgctgccttgcaactgaatggagcagttcccttgggggccctgaatccagcagctctgactgctctgagtccagccctgaaccttgcctcccagtgtttccagctctccagcctctttaccccccagaccatgtaaatcagtggcacagtatactgcctccttgtgcctctggatcctgccacttcacatctactcttccatggccccatttctccattttgtggaccaagccatcctgagggcatggacattgtctctgaggaaattggggccacccttaagataccaagaaaagctcctgcccatggtcccactggaaatggactctgctgagcaaagccaccagttgaagagaacagaatccacacctgcattgaatacctgtttctccatgtgtatcgtctctgagattaccttcttgccctttccaacaccttagtgattcctcaatttctcccccattgggaaggccatagggcatactgaaggaactgacctctctccttttcctgtacctttaacctttagtctgtcaaggaaaacccttaggacctctgaatcaagaggactgagtttgtgggtgaaccttgaaggtgctctttctgctacaagggccctgggagatagcatggacgtgcattgagaagccagcctcagaccttagcttgaagcagcttgaggccagacctactgtagcctcagcatcttgctaggaggcatggaagtgatctatcctgccaggaggcctcagagtgatctgtcctgccaggaggtgtgagagtgatctgtcctgtgaggcatttaggggctttcaggaatttagtaaaaggtggagtatgcctttccagtatcttccatcttcctttgtatacttgtccttcctcccatttcctccctttggcccgaggtaggaggatggagggaggctgctactctaccacttcctgtgtgcctctactgtggcctcaaccctggcaattatagctactcccatcccttacctgggcatgtgtgagcccttctcactggattttatacccttgtgtctgtgtacataaatatatatacatatatatatacataaaaactttgtacaaaaggcaagcctcctccttgtggcagctgttgcccatttgtgtgtggtctttgttgtgtgtctgacaacttctcattagcccaacttatgatgtttctagggatataaaacattagtaacatc

SEQ ID NO: 4404 - DNA, 581 bp, Homo sapiens
  source 1..581: mol_type = genomic DNA
attttgcgggaagaggaggctctgtacctgcagtgctgcttttcttgcctagactctaggaactatccgagctccactccccacaacatactcaaaggaacggagagaaccgggacccccctgcggggacccggaactgatctgacaggatggcatctgatgactttgacatagtgattgaggccatgctggaagctccctataaaaaagaagaggatgagcaacaaaggaaagaagttaaaaaggattatcctagcaataccaccagcagcaccagcaacagtggcaatgagaccagtggaagcagcaccatcggggagacaagcaagaagaagaggagtcggagccataataaaagcagggatagaaagcgcagtcgtagtcgagatcgggatcggtatagacggagaaatagtcggagccgaagtccaggtcggcagtgtcgtcaccgtagccgtagctgggatcgtcgacatggtagtgagtcgcgaagtcgggaccatcgtcgtgaggatcgtgtgcattacaggagtcctccacttgccactggggagccagttgataatctgagtcctgaggag

SEQ ID NO: 4405 - DNA, 457 bp, Homo sapiens
  source 1..457: mol_type = genomic DNA
agagctgccgccattttgcgggaagaggaggctctgtacctgcagtgctgcttttcttgcctagactctaggaactatccgagctccactccccacaacatactcaaaggaacggagagaaccgggacccccctgcggggacccggaactggctggagcacagtggcgcgttctcggctcattgcaacctccacctcctgggttcaagcagttcttatgccacagccttccaagcagctgggactacagatctgacaggatggcatctgatgactttgacatagtgattgaggccatgctggaagctccctataaaaaagaagaggatgagcaacaaaggaaagaagttaaaaaggattatcctagcaataccaccagcagcaccagcaacagtggcaatgagaccagtggaagcagcaccatcggggagacaagcaatcgtagtcgagatcgggat

SEQ ID NO: 4406 - DNA, 571 bp, Homo sapiens
  source 1..571: mol_type = genomic DNA
attacaggtgtgtgccaccacacccagctaatttttatatttttggtagagggggtttcgccatgttggccaggctggtctcaaactcctgacctcaggtgatctgcctgccttgccctcccagagtgctaggattacaggtgtgagccactgcgcccggactatccttgactgttccaagccacaaagtcgaactagttcagatctatagggtgtaaaaataaacctagagtaagtgacagctggtaaggtttctttgcagttcaagaaacagaactgaaatctgtatatcctgaagtctctttcttggagtgggaaagaaatgtgtggtgctggaaagggaggaaaaatataaaacagattcttacatattaatatcctctccccagatctgacaggatggcatctgatgactttgacatagtgattgaggccatgctggaagctccctataaaaaagaagaggatgagcaacaaaggaaagaagttaaaaaggattatcctagcaataccaccagcagcaccagcaacagtggcaatgagaccagtggaagcagcaccatcggggaga

SEQ ID NO: 4407 - DNA, 569 bp, Homo sapiens
  source 1..569: mol_type = genomic DNA
aagacggcagagctgccgccattttgcgggaagaggaggctctgtacctgcagtgctgcttttcttgcctagactctaggaactatccgagctccactccccacaacatactcaaaggaacggagagaaccgggacccccctgcggggacccggaactgatggaatcttgctctgtcacccaggctggagcacagtggcgcgttctcggctcattgcaacctccacctcctgggttcaagcagttcttatgccacagccttccaagcagctgggactacagatctgacaggatggcatctgatgactttgacatagtgattgaggccatgctggaagctccctataaaaaagaagaggatgagcaacaaaggaaagaagttaaaaaggattatcctagcaataccaccagcagcaccagcaacagtggcaatgagaccagtggaagcagcaccatcggggagacaagcaagaagaagaggagtcggagccataataaaagcagggatagaaagcgcagtcgtagtcgagatcgggatcggtatagacggagaaatagtcggagccgaag

SEQ ID NO: 4408 - DNA, 583 bp, Homo sapiens
  source 1..583: mol_type = genomic DNA
agagctgccgccattttgcgggaagaggaggctctgtacctgcagtgctgcttttcttgcctagactctaggaactatccgagctccactccccacaacatactcaaaggaacggagagaaccgggacccccctgcggggacccggaactgatggaatcttgctctgtcacccaggctggagcacagtggcgcgttctcggctcattgcaacctccacctcctgggttcaagcagttcttatgccacagccttccaagcagctgggactacagatctgacaggatggcatctgatgactttgacatagtgattgaggccatgctggaagctccctataaaaaagaagaggatgagcaacaaaggaaagaagttaaaaaggattatcctagcaataccaccagcagcaccagcaacagtggcaatgagaccagtggaagcagcaccatcggggagacaagcaatcgtagtcgagatcgggatcggtatagacggagaaatagtcggagccgaagtccaggtcggcagtgtcgtcaccgtagccgtagctgggatcgtcgacatggtagtgagtcgcgaagtcgg

SEQ ID NO: 4409 - DNA, 2703 bp, Homo sapiens
  source 1..2703: mol_type = genomic DNA
ggagagagcgaagtcaagtctccagggccgctggcgacttcggaagccgcgcgcccggcgctctcggccgcccccggccgctcgcccccgccgcgccgccgccctcgcccccgggctcgcccttggcccccggcggccgcgaaagggtgcgggagacgcggagccggaggaggaggcgcagccgctgcccgagccgcagccgcagccggagcccgagccgcggggcgggtgcgaagatgcacacgacccagaaggacacgacgtacaccaagatcttcgtcggggggctgccctaccacaccaccgacgccagcctgcgcaagtacttcgaggtcttcggcgagatcgaggaggcggtggtcatcaccgaccggcagacgggcaagtcccggggctatggatttgtcaccatggctgaccgggctgctgccgaaagggcctgcaaggatcccaatcccatcattgatggcagaaaggccaacgtgaacctggcatacttaggagcaaaaccaaggatcatgcaaccaggttttgcctttggtgttcaacaacttcatccagcccttatacaaagacctttcgggatacctgcccactatgtctatccgcaggcttttgtgcagccgggagtggtcattccacacgtccagccgacagcagctgccgcctccaccaccccttacattgattacactggagctgcatacgcacaatactcagcagctgctgctgctgccgccgccgctgctgcctatgaccagtacccctatgcagcctctccagctgctgcaggatatgttactgctgggggctatggctacgcagtccagcagccaatcaccgcagcggcacctgggacagctgccgccgccgctgcagcagctgctgccgctgcagcatttggccagtaccagcctcagcagctgcagacagaccgaatgcaatagaccagccatctgatcaaagttgaattgttttctctttccctcccaattttccaatttttagtagctaataagagagttaacattgacttaacagctttaaaaaaaaaaacagccatgctattgtgaagcagagttattattttttttatactccaggtagtgttctagatgagaaagaggtaagaatgaggggaatgggcacaattttggaaatcaatcccaaagagcctgagtaaatgaaaggccactacgaaatgacgccaggagtaacaacggaacttcacttttgtaacgggatttttatttttgctctttttatagtatcagggaagcaaactgccttttacaagttagaaaatgctgtttgaatctagttgaaccagggaatacagagcgagcaatatgtagcttgaattacatttaaaagcagattttttacaaacaaaatggcgaaagcactgattgtcatttttagcagtcacttaaggcctatagaacttttttcaagtcggaaggtcctgttcttactatctcaaaaatgggcatcgaacaatcaatctaggagcgtggcagtgggtaaaatggtggacaggcaccaaagctattttctcatctgtcctgtggatgagtggaactgtggaacaagtgatgtggaattaatgggtgcaacagctgtacagacaatcaataacacacacagttctggaaagaacacatcacttgtgcttgtttgatgagcttgtcacattctaatccctctccccatcctgtttcaattttgggaaacttgtatctgctggtgtcagcaattctgattctgaaataggatcaggcttttactacaacagccttctctttctatttattgtgtcgactcgtggcttatgaataaaggcaggcaaagtttgcagaactgtcttaaggacatttattttttttccctttttaagtaattttacactttagtatctatttcagagtcatatttaaaactatttattagtgactacagtacatgagacaacaaggttactgagattacaattcttcaaaggttaatgataatgtggtttatactgtgccttaatagtaatgctatttaagatatttatttttaagttttactatgctgcactctaaagaaaggaactttagatgtgacactgtaaaattatgtattcatctcatggcataaattatttagtaagtctagatgtagcgtattaaatattaacctattcaactaaagatgttgacttggatttatttaaattcatatgtgcactgtataagagagtactcttacattaacacattttagtttagtttttagatttttttttaaacgatatattgctagtttcatgcttcctcctctgattttgcctgtgtagatttcatttattggtaattcattagtttaacactattatgtagtttttaaatgctgctttacatttttcttctgaaactgcaatacttgcaatttttattcttaaactaaattgaatactattttacactgtattggatttttatacttgaacaatttcatacaagggaagacaggttagcatttttatggactttctccattatcactggatttactttaagtattcccatactagacagtgttatgtaatgtagacatgactctcctgtgcaaattatttattcgttgtgtatattgctttataacatttcagatcttctaatctattcacttgtattaaatataatttttaaaaacttc

SEQ ID NO: 4410 - DNA, 2394 bp, Homo sapiens
  source 1..2394: mol_type = genomic DNA
gatctcagttttatcatgaatgacttctccattgtgattcttgatttccttcatgggttaatttagaggttatgtatgtatgtctgtgtgtgtctgttgctaaggtcaccatggctgaccgggctgctgccgaaagggcctgcaaggatcccaatcccatcattgatggcagaaaggccaacgtgaacctggcatacttaggagcaaaaccaaggatcatgcaaccaggttttgcctttggtgttcaacaacttcatccagcccttatacaaagacctttcgggatacctgcccactatgtctatccgcaggcttttgtgcagccgggagtggtcattccacacgtccagccgacagcagctgccgcctccaccaccccttacattgattacactggagctgcatacgcacaatactcagcagctgctgctgctgccgccgccgctgctgcctatgaccagtacccctatgcagcctctccagctgctgcaggatatgttactgctgggggctatggctacgcagtccagcagccaatcaccgcagcggcacctgggacagctgccgccgccgctgcagcagctgctgccgctgcagcatttggccagtaccagcctcagcagctgcagacagaccgaatgcaatagaccagccatctgatcaaagttgaattgttttctctttccctcccaattttccaatttttagtagctaataagagagttaacattgacttaacagctttaaaaaaaaaaacagccatgctattgtgaagcagagttattattttttttatactccaggtagtgttctagatgagaaagaggtaagaatgaggggaatgggcacaattttggaaatcaatcccaaagagcctgagtaaatgaaaggccactacgaaatgacgccaggagtaacaacggaacttcacttttgtaacgggatttttatttttgctctttttatagtatcagggaagcaaactgccttttacaagttagaaaatgctgtttgaatctagttgaaccagggaatacagagcgagcaatatgtagcttgaattacatttaaaagcagattttttacaaacaaaatggcgaaagcactgattgtcatttttagcagtcacttaaggcctatagaacttttttcaagtcggaaggtcctgttcttactatctcaaaaatgggcatcgaacaatcaatctaggagcgtggcagtgggtaaaatggtggacaggcaccaaagctattttctcatctgtcctgtggatgagtggaactgtggaacaagtgatgtggaattaatgggtgcaacagctgtacagacaatcaataacacacacagttctggaaagaacacatcacttgtgcttgtttgatgagcttgtcacattctaatccctctccccatcctgtttcaattttgggaaacttgtatctgctggtgtcagcaattctgattctgaaataggatcaggcttttactacaacagccttctctttctatttattgtgtcgactcgtggcttatgaataaaggcaggcaaagtttgcagaactgtcttaaggacatttattttttttccctttttaagtaattttacactttagtatctatttcagagtcatatttaaaactatttattagtgactacagtacatgagacaacaaggttactgagattacaattcttcaaaggttaatgataatgtggtttatactgtgccttaatagtaatgctatttaagatatttatttttaagttttactatgctgcactctaaagaaaggaactttagatgtgacactgtaaaattatgtattcatctcatggcataaattatttagtaagtctagatgtagcgtattaaatattaacctattcaactaaagatgttgacttggatttatttaaattcatatgtgcactgtataagagagtactcttacattaacacattttagtttagtttttagatttttttttaaacgatatattgctagtttcatgcttcctcctctgattttgcctgtgtagatttcatttattggtaattcattagtttaacactattatgtagtttttaaatgctgctttacatttttcttctgaaactgcaatacttgcaatttttattcttaaactaaattgaatactattttacactgtattggatttttatacttgaacaatttcatacaagggaagacaggttagcatttttatggactttctccattatcactggatttactttaagtattcccatactagacagtgttatgtaatgtagacatgactctcctgtgcaaattatttattcgttgtgtatattgctttataacatttcagatcttctaatctattcacttgtattaaatataattttt

SEQ ID NO: 4411 - DNA, 1034 bp, Homo sapiens
  source 1..1034: mol_type = genomic DNA
acaattgcattcccgggctggatgccggttgttaagcgcgctgttgctttgtaaaaatgcgtgtgttctggtgttttggctggggcagggaggggacaccccacgaggtctggggctgttgcccttgtgtcatccccccgccttttaactgcaaaggtcaccatggctgaccgggctgctgccgaaagggcctgcaaggatcccaatcccatcattgatggcagaaaggccaacgtgaacctggcatacttaggagcaaaaccaaggatcatgcaaccaggttttgcctttggtgttcaacaacttcatccagcccttatacaaagacctttcgggatacctgcccactatgtctatccgcaggcttttgtgcagccgggagtggtcattccacacgtccagccgacagcagctgccgcctccaccaccccttacattgattacactggagctgcatacgcacaatactcagcagctgctgctgctgccgccgccgctgctgcctatgaccagtacccctatgcagcctctccagctgctgcaggatatgttactgctgggggctatggctacgcagtccagcagccaatcaccgcagcggcacctgggacagctgccgccgccgctgcagcagctgctgccgctgcagcatttggccagtaccagcctcagcagctgcagacagaccgaatgcaatagaccagccatctgatcaaagttgaattgttttctctttccctcccaattttccaatttttagtagctaataagagagttaacattgacttaacagctttaaaaaaaaaaacagccatgctattgtgaagcagagttattattttttttatactccaggtagtgttctagatgagaaagaggtaagaatgaggggaatgggcacaattttggaaatcaatcccaaagagcctgagtaaatgaaaggccactacgaaatgacgccaggagtaacaacggaacttcacttttgtaacgggatttttatttttgctctttttatagtatcagggaagcaa

SEQ ID NO: 4412 - DNA, 541 bp, Homo sapiens
  source 1..541: mol_type = genomic DNA
agaaggtcgcgaaggcagtaccgtttcctcagcggcgggtgagtttgtgtctctgaacgcgtgtggaaaccgggagaccgggtgcctcagctggtggaggaggaaaagccggggtggctgcgaaagcgccagggtggggtagagactgctgcagtaagaatgtcttttccacctcatttgaatcgccctcccatgggaatcccagcactcccaccagggatcccacccccgcagtttccaggatttcctccacctgtacctccagggaccccaatgattcctgtaccaatgagcattatggctcctgctccaactgtcttagtacccactgtgtctatggttggaaagcatttgggcgcaagaaaggatcatccaggcttaaaggctaaagaaaatgatgaaaattgtggtcctactaccactgtttttgttggcaacatttccgagaaagcttcagacatgcttataagacaactcttagctaaatgtggtttggttttgagctggaagagagtacaaggtgcttccggaaagcttcaag

SEQ ID NO: 4413 - DNA, 2470 bp, Homo sapiens
  source 1..2470: mol_type = genomic DNA
ctcgccgcgcagcgcggctgtatttgcggcctgtgcgagtaggcgcttgggcactcagtctccctggcgagcgacgggcagaaatctcgaaccagtggagcgcactcgtaacctggatcccagaaggtcgcgaaggcagtaccgtttcctcagcggcggactgctgcagtaagaatgtcttttccacctcatttgaatcgccctcccatgggaatcccagcactcccaccagggatcccacccccgcagtttccaggatttcctccacctgtacctccagggaccccaatgattcctgtaccaatgagcattatggctcctgctccaactgtcttagtacccactgtgtctatggttggaaagcatttgggcgcaagaaaggatcatccaggcttaaaggctaaagaaaatgatgaaaattgtggtcctactaccactgtttttgttggcaacatttccgagaaagcttcagacatgcttataagacaactcttagctaaatgtggtttggttttgagctggaagagagtacaaggtgcttccggaaagcttcaagccttcggattctgtgagtacaaggagccagaatctaccctccgtgcactcagattattacatgacctgcaaattggagagaaaaagctactcgttaaagttgatgcaaagacaaaggcacagctggatgaatggaaagcaaagaagaaagcttctaatgggaatgcaaggccagaaactgtcactaatgacgatgaagaagccttggatgaagaaacaaagaggagagatcagatgattaaaggggctattgaagttttaattcgtgaatactccagtgagctaaatgccccctcacaggaatctgattctcaccccaggaagaagaagaaggaaaagaaggaggacattttccgcagatttccagtggccccactgatcccttatccactcatcactaaggaggatataaatgctatagaaatggaagaagacaaaagagacctgatatctcgagagatcagcaaattcagagacacacataaggtagtattcttgtcttttcacttgataccaatctagactttttacagaatccaaagcaaagagacaaaaaaaatcaaccttaaattagaatataattttaaatgttttttataggtttaattgatatttagatagaaaaaagaaacagaagaccaataccatattaaagtggtccttgacatgttgtgcttagttttttcagttactgactattctgcagtcatctcactttaatatgaatagaagctaattttatttttagatttcaacataaacatcaaggtcagacttaaattagattcagggggcagcaggataacatacactgtagtgtatttctgggggcagttatttaacttgatcttaggaataccttttctttagagctgagattaaaatttacattttatatttgtatagatttaagttgagtgggggagattttaaacagtaggtcagtggttaccagacttaccaaattttagatgcatggaagaactgtaaattcccataaagctaatctattcattgacccccaccattatgatagagatcatatggtgactaatgcaagatgaaactctcagcttggaaagtaacaaggaataggatgtaagtatgagcttctgttttttattatatttatggatgccccctcagaaaaatatgcaaaggggtaactggcttggaaatgggtatttatgcatagtaaatcccactcacgagttttgcctatttgaagcttctctcaatgacagtgcatctgtgaatgttcgctggtgttgaaaatgatgcttttgaacggtgcaatgcaaacactgcatgaaatgtattttgatggtcgagataataaggtgttgctggttcttactgatagactgagagatctttaactcagtgaaatgttaaatgttcattttctcttttattcttactttttcccattgctttcaaaatctgcagttcacaaataatgccaatgaatcagtgctgctgaacacttactatccagatgcccagcccttgctcacaaacacaatgctttttcaagaattaaatgtgtctaagagcacaaacataattctcccaaaattaattttgagagttgaaaaggtggtctatgggaaatcattttagatgaataattttggttaggtataatactgaaattcaggaccgagtaagcttaaaaatggtatatggttgtgtgtgtggtttaccccctttttgtttttatttatttgttaaaccctgtcatgttattggtaaattatgaggaaatcatgttttaagaaaaattcaaaaatatatttgctttaaagtttgggaatctgttaggcattttactgccttagtattatttcactggagggaatgttttgaattttcagaatgtcttttcaaaataaaaagaaatcaaaatgaaaaa

SEQ ID NO: 4414 - DNA, 1039 bp, Homo sapiens
  source 1..1039: mol_type = genomic DNA
aagacctccatcagctcgccgcgcagcgcggctgtatttgcggcctgtgcgagtaggcgcttgggcactcagtctccctggcgagcgacgggcagaaatctcgaaccagtggagcgcactcgtaacctggatcccagaaggtcgcgaaggcagtaccgtttcctcagcggcggacggagtcttactctgtcgttcaggttggagtgcagtggcgcgacctcggctcactgcaacatctgcctcccaggttcaagcaattctcctgcctcaccttccagagtagctgggattacagactgctgcagtaagaatgtcttttccacctcatttgaatcgccctcccatgggaatcccagcactcccaccagggatcccacccccgcagtttccaggatttcctccacctgtacctccagggaccccaatgattcctgtaccaatgagcattatggctcctgctccaactgtcttagtacccactgtgtctatggttggaaagcatttgggcgcaagaaaggatcatccaggcttaaaggctaaagaaaatgatgaaaattgtggtcctactaccactgtttttgttggcaacatttccgagaaagcttcagacatgcttataagacaactcttagctaaatgtggtttggttttgagctggaagagagtacaaggtgcttccggaaagcttcaagccttcggattctgtgagtacaaggagccagaatctaccctccgtgcactcagattattacatgacctgcaaattggagagaaaaagctactcgttaaagttgatgcaaagacaaaggcacagctggatgaatggaaagcaaagaagaaagcttctaatgggaatgcaaggccagaaactgtcactaatgacgatgaagaagccttggatgaagaaacaaagaggagagatcagatgattaaaggggctattgaagttttaattcgtgaatactccagtgagctaaatgccccctcacaggaatctgattctcaccccaggaagaagaagaaggaaaagaaggaggac

SEQ ID NO: 4415 - DNA, 4426 bp, Homo sapiens
  source 1..4426: mol_type = genomic DNA
tggtgagtcagagccaacagcggagacgatctatatacgttcttctctatggttccgcgctccccgcccccggccgcagtgcacgccgggcaagaggaagacctccatcagctcgccgcgcagcgcggctgtatttgcggcctgtgcgagtaggcgcttgggcactcagtctccctggcgagcgacgggcagaaatctcgaaccagtggagcgcactcgtaacctggatcccagaaggtcgcgaaggcagtaccgtttcctcagcggcggactgctgcagtaagaatgtcttttccacctcatttgaatcgccctcccatgggaatcccagcactcccaccagggatcccacccccgcagtttccaggatttcctccacctgtacctccagggaccccaatgattcctgtaccaatgagcattatggctcctgctccaactgtcttagtacccactgtgtctatggttggaaagcatttgggcgcaagaaaggatcatccaggcttaaaggctaaagaaaatgatgaaaattgtggtcctactaccactgtttttgttggcaacatttccgagaaagcttcagacatgcttataagacaactcttagctaaatgtggtttggttttgagctggaagagagtacaaggtgcttccggaaagcttcaagccttcggattctgtgagtacaaggagccagaatctaccctccgtgcactcagattattacatgacctgcaaattggagagaaaaagctactcgttaaagttgatgcaaagacaaaggcacagctggatgaatggaaagcaaagaagaaagcttctaatgggaatgcaaggccagaaactgtcactaatgacgatgaagaagccttggatgaagaaacaaagaggagagatcagatgattaaaggggctattgaagttttaattcgtgaatactccagtgagctaaatgccccctcacaggaatctgattctcaccccaggaagaagaagaaggaaaagaaggaggacattttccgcagatttccagtggccccactgatcccttatccactcatcactaaggaggatataaatgctatagaaatggaagaagacaaaagagacctgatatctcgagagatcagcaaattcagagacacacataagaaactggaagaagagaaaggcaaaaaggaaaaagaaagacaggaaattgagaaagaacggagagaaagagagagggagcgtgaaagggaacgagaaaggcgagaacgggaacgagaaagggaaagagaacgtgaacgagaaaaggagaaagaacgggagcgggaacgagaacgggatagggaccgtgaccggacaaaagagagagaccgagatcgggatcgagagagagatcgtgaccgggatagagaaaggagctcagatcgtaataaggatcgcagtcgatcaagagaaaaaagcagagatcgtgaaagggaacgagagcgggaaagagagagagagagagaacgagagcgagaacgagaacgggagcgagagagagagcgagagagggaacgggagcgagaaagagaaaaagacaaaaaacgggaccgagaagaagatgaagaagatgcatacgaacgaagaaaacttgaaagaaaactccgagagaaagaagctgcttatcaagagcgccttaagaattgggaaatcagagaacgaaagaaaacccgggaatatgagaaagaagctgaaagagaagaagaaagaagaagagaaatggccaaagaagctaaacgactaaaagaattcttagaagactatgatgatgatagagatgaccccaaatattacagaggaagtgctcttcagaaaaggttgcgtgatagagaaaaggaaatggaagcagatgaacgagataggaagagagagaaggaggagcttgaggaaatcaggcagcgccttctggcagaagggcatccagatccagatgcagagctccagaggatggaacaagaggctgagaggcgcaggcagccacaaataaagcaagagccagaatcagaagaggaggaagaagaaaagcaagaaaaagaagaaaaacgagaagaacccatggaagaggaagaggagccagagcaaaagccttgtctgaaacctactctgaggcccatcagctctgctccatctgtttcctctgccagtggcaatgcaacacctaacactcctggggatgagtctccctgtggtattattattcctcatgaaaactcaccagatcaacagcaacctgaggagcataggccaaaaataggactaagtcttaaactgggtgcttccaatagtcctggtcagcctaattctgtgaagagaaagaaactacctgtagatagtgtctttaacaaatttgaggatgaagacagtgatgacgtaccccgaaaaaggaaactggttcccttggattatggtgaagatgataaaaatgcaaccaaaggcactgtaaacactgaagaaaagcgtaaacacattaagagtctcattgagaaaatccctacagccaaacctgagctcttcgcttatcccctggattggtctattgtggattctatactgatggaacgtcgaattagaccatggattaataagaaaatcatagaatatataggtgaagaagaagctacattagttgattttgtttgttctaaggttatggctcatagttcaccccagagcattttagatgatgttgccatggtacttgatgaagaagcagaagtttttatagtcaaaatgtggagattattgatatatgaaacagaagccaagaaaattggtcttgtgaagtaaaactttttatatttagagttccatttcagatttcttctttgccacccttttaaggactttgaatttttctttgtctttgaagacattgtgagatctgtaattttttttttttgtagaaaatgtgaattttttggtcctctaatttgttgttgccctgtgtactcccttggttgtaaagtcatctgaatccttggttctctttatactcaccaggtacaaattactggtatgttttataagccgcagctactgtacacagcctatctgatataatcttgttctgctgatttgtttcttgtaaatattaaaacgactccccaattattttgcagaattgcacttaatattgaaatgtactgtataggaaccaacatgaacaattttaattgaaaacaccagtcataaactattaccacccccactctcttttgatcagaaatggcaagcccttgtgaaggcatggagtttaaaattggaatgcaaaaattagcagacaatccattcctactgtatttctgtatgaatgtgtttgtgaatgtatgtgtaaaagtctttcttttccctaatttgctttggtggggtccttaaaacatttcccaactaaagaatagaattgtaaaggaaaagtggtactgttccaacctgaaatgtctgttataattaggttattagtttcccagagcatggtgttctcgtgtcgtgagcaatgtggtttgctaactggatggggttttcttattaataagatggctgcttcagcttctcttttaaaggaatgtggatcatagtgatttttccttttaattttattgctcagaaatgaggcatatcctaaaaatcctggagagctgtatttaatgcatttttgcactaattggtccttagtttaattctattgtatctgtttatttaacaaaaaattcatcataccaaaaagtgtaagtgaaaaccccctttaaaacaaaacaaaaaaatgaaataaaattaggcaaattgacagacagtgagagttttacaaacatgataggtattctgctcggcaatttgtaagtttacatgttatttaaggataaaggtaaatcattcaaggcagttaccaaccactaactatttgttttcatttttgtcttgtagaaggtttatatcttgttttaccttggctcattagtgtttaaaaatgtactgatgatgtgcttagagaaattcctggggctttcttcgttgtagatcagaatttcaccagggagtaaaattacctgaaaacgtaagaagttttaaacagcttttcacacaaattagatgcaactgttcccatgtctgagtacttatttaaaagaaaggtaaagattggcctgttagaaaaagcataatgtgagctttggattactggattttttttttttttaaacacacctggagaggacatttgaaaacactgttcttaccctcgaaccctgatgtggttccattatgtaaatatttcaaatattaaaaatgtatatatttgatcctggggactcatattctttcagaatcatgtaaataaatggcatcatgttgtaattgtgtggtgcatactagaaaagttaaaaatatgggctgaactttt

SEQ ID NO: 4416 - DNA, 3375 bp, Homo sapiens
  source 1..3375: mol_type = genomic DNA
gaagacctccatcagctcgccgcgcagcgcggctgtatttgcggcctgtgcgagtaggcgcttgggcactcagtctccctggcgagcgacgggcagaaatctcgaaccagtggagcgcactcgtaacctggatcccagaaggtcgcgaaggcagtaccgtttcctcagcggcggggtctttctctgtctctcagcctcaagccatcctcctgcatcagcctcccaagtagttgggaccatagactgctgcagtaagaatgtcttttccacctcatttgaatcgccctcccatgggaatcccagcactcccaccagggatcccacccccgcagtttccaggatttcctccacctgtacctccagggaccccaatgattcctgtaccaatgagcattatggctcctgctccaactgtcttagtacccactgtgtctatggttggaaagcatttgggcgcaagaaaggatcatccaggcttaaaggctaaagaaaatgatgaaaattgtggtcctactaccactgtttttgttggcaacatttccgagaaagcttcagacatgcttataagacaactcttagctaaatgtggtttggttttgagctggaagagagtacaaggtgcttccggaaagcttcaagccttcggattctgtgagtacaaggagccagaatctaccctccgtgcactcagattattacatgacctgcaaattggagagaaaaagctactcgttaaagttgatgcaaagacaaaggcacagctggatgaatggaaagcaaagaagaaagcttctaatgggaatgcaaggccagaaactgtcactaatgacgatgaagaagccttggatgaagaaacaaagaggagagatcagatgattaaaggggctattgaagttttaattcgtgaatactccagtgagctaaatgccccctcacaggaatctgattctcaccccaggaagaagaagaaggaaaagaaggaggacattttccgcagatttccagtggccccactgatcccttatccactcatcactaaggaggatataaatgctatagaaatggaagaagacaaaagagacctgatatctcgagagatcagcaaattcagagacacacataagaaactggaagaagagaaaggcaaaaaggaaaaagaaagacaggaaattgagaaagaacggagagaaagagagagggagcgtgaaagggaacgagaaaggcgagaacgggaacgagaaagggaaagagaacgtgaacgagaaaaggagaaagaacgggagcgggaacgagaacgggatagggaccgtgaccggacaaaagagagagaccgagatcgggatcgagagagagatcgtgaccgggatagagaaaggagctcagatcgtaataaggatcgcagtcgatcaagagaaaaaagcagagatcgtgaaagggaacgagagcgggaaagagagagagagagagaacgagagcgagaacgagaacgggagcgagagagagagcgagagagggaacgggagcgagaaagagaaaaagacaaaaaacgggaccgagaagaagatgaagaagatgcatacgaacgaagaaaacttgaaagaaaactccgagagaaagaagctgcttatcaagagcgccttaagaattgggaaatcagagaacgaaagaaaacccgggaatatgagaaagaagctgaaagagaagaagaaagaagaagagaaatggccaaagaagctaaacgactaaaagaattcttagaagactatgatgatgatagagatgaccccaaatattacagaggaagtgctcttcagaaaaggttgcgtgatagagaaaaggaaatggaagcagatgaacgagataggaagagagagaaggaggagcttgaggaaatcaggcagcgccttctggcagaagggcatccagatccagatgcagagctccagaggatggaacaagaggctgagaggcgcaggcagccacaaataaagcaagagccagaatcagaagaggaggaagaagaaaagcaagaaaaagaagaaaaacgagaagaacccatggaagaggaagaggagccagagcaaaagccttgtctgaaacctactctgaggcccatcagctctgctccatctgtttcctctgccagtggcaatgcaacacctaacactcctggggatgagtctccctgtggtattattattcctcatgaaaactcaccagatcaacagcaacctgaggagcataggccaaaaataggactaagtcttaaactgggtgcttccaatagtcctggtcagcctaattctgtgaagagaaagaaactacctgtagatagtgtctttaacaaatttgaggatgaagacagtgatgacgtaccccgaaaaaggaaactggttcccttggattatggtgaagatgataaaaatgcaaccaaaggcactgtaaacactgaagaaaagcgtaaacacattaagagtctcattgagaaaatccctacagccaaacctgagctcttcgcttatcccctggattggtctattgtggattctatactgatggaacgtcgaattagaccatggattaataagaaaatcatagaatatataggtgaagaagaagctacattagttgattttgtttgttctaaggttatggctcatagttcaccccagagcattttagatgatgttgccatggtacttgatgaagaagcagaagtttttatagtcaaaatgtggagattattgatatatgaaacagaagccaagaaaattggtcttgtgaagtaaaactttttatatttagagttccatttcagatttcttctttgccacccttttaaggactttgaatttttctttgtctttgaagacattgtgagatctgtaattttttttttttgtagaaaatgtgaattttttggtcctctaatttgttgttgccctgtgtactcccttggttgtaaagtcatctgaatccttggttctctttatactcaccaggtacaaattactggtatgttttataagccgcagctactgtacacagcctatctgatataatcttgttctgctgatttgtttcttgtaaatattaaaacgactccccaattattttgcagaattgcacttaatattgaaatgtactgtataggaaccaacatgaacaattttaattgaaaacaccagtcataaactattaccacccccactctcttttgatcagaaatggcaagcccttgtgaaggcatggagtttaaaattggaatgcaaaaattagcagacaatccattcctactgtatttctgtatgaatgtgtttgtgaatgtatgtgtaaaagtctttcttttccctaatttgctttggtggggtcctt

SEQ ID NO: 4417 - DNA, 1567 bp, Homo sapiens
  source 1..1567: mol_type = genomic DNA
cgccgcgcagcgcggctgtatttgcggcctgtgcgagtaggcgcttgggcactcagtctccctggcgagcgacgggcagaaatctcgaaccagtggagcgcactcgtaacctggatcccagaaggtcgcgaaggcagtaccgtttcctcagcggcggactgctgcagtaagaatgtcttttccacctcatttgaatcgccctcccatgggaatcccagcactcccaccagggatcccacccccgcagtttccaggatttcctccacctgtacctccagggaccccaatgattcctgtaccaatgagcattatggctcctgctccaactgtcttagtacccactgtgtctatggttggaaagcatttgggcgcaagaaaggatcatccaggcttaaaggctaaagaaaatgatgaaaattgtggtcctactaccactgtttttgttggcaacatttccgagaaagcttcagacatgcttataagacaactcttagctaaatgtggtttggttttgagctggaagagagtacaaggtgcttccggaaagcttcaagccttcggattctgtgagtacaaggagccagaatctaccctccgtgcactcagattattacatgacctgcaaattggagagaaaaagctactcgttaaagttgatgcaaagacaaaggcacagctggatgaatggaaagcaaagaagaaagcttctaatgggaatgcaaggccagaaactgtcactaatgacgatgaagaagccttggatgaagaaacaaagaggagagatcagatgattaaaggggctattgaagttttaattcgtgaatactccagtgagctaaatgccccctcacaggaatctgattctcaccccaggaagaagaagaaggaaaagaaggaggacattttccgcagatttccagtggccccactgatcccttatccactcatcactaaggaggatataaatgctatagaaatggaagaagacaaaagagacctgatatctcgagagatcagcaaattcagagacacacataagagatcatatggtgactaatgcaagatgaaactctcagcttggaaagtaacaaggaataggatttcacaaataatgccaatgaatcagtgctgctgaacacttactatccagatgcccagcccttgctcacaaacacaatgctttttcaagaattaaatgtgtctaagagcacaaacataattctcccaaaattaattttgagagttgaaaaggtggtctatgggaaatcattttagatgaataattttggttaggtataatactgaaattcaggaccgagtaagcttaaaaatggtatatggttgtgtgtgtggtttaccccctttttgtttttatttatttgttaaaccctgtcatgttattggtaaattatgaggaaatcatgttttaagaaaaattcaaaaatatatttgctttaaagtttgggaatctgttaggcattttactgccttagtattatttcactggagggaatgttttgaattttcagaatgtcttttcaaaataaaaagaaatcaaaatgaaaaa

SEQ ID NO: 4418 - DNA, 1093 bp, Homo sapiens
  source 1..1093: mol_type = genomic DNA
agtgcacgccgggcaagaggaagacctccatcagctcgccgcgcagcgcggctgtatttgcggcctgtgcgagtaggcgcttgggcactcagtctccctggcgagcgacgggcagaaatctcgaaccagtggagcgcactcgtaacctggatcccagaaggtcgcgaaggcagtaccgtttcctcagcggcggactgctgcagtaagaatgtcttttccacctcatttgaatcgccctcccatgggaatcccagcactcccaccagggatcccacccccgcagtttccaggatttcctccacctgtacctccagggaccccaatgattcctgtaccaatgagcattatggctcctgctccaactgtcttagtacccactgtgtctatggttggaaagcatttgggcgcaagaaaggatcatccaggcttaaaggctaaagaaaatgatgaaaattgtggtcctactaccactgtttttgttggcaacatttccgagaaagcttcagacatgcttataagacaactcttagctaaatgtggtttggttttgagctggaagagagtacaaggtgcttccggaaagcttcaagccttcggattctgtgagtacaaggagccagaatctaccctccgtgcactcagattattacatgacctgcaaattggagagaaaaagctactcgttaaagttgatgcaaagacaaaggcacagctggatgaatggaaagcaaagaagaaagcttctaatgggaatgcaaggccagaaactgtcactaatgacgatgaagaagccttggatgaagaaacaaagaggagagatcagatgattaaaggggctattgaagttttaattcgtgaatactccagtgagctaaatgccccctcacaggaatctgattctcaccccaggaagaagaagaaggaaaagaaggaggacattttccgcagatttccagtggccccactgatcccttatccactcatcactaaggaggatataaatgctatagaaatggaagaagacaaaagagacctgatatctcgagagatcagcaaattcagagacacacataagagatcatatggtgactaa

SEQ ID NO: 4419 - DNA, 3624 bp, Homo sapiens
  source 1..3624: mol_type = genomic DNA
tagggccgctgtggatggtttctaaaatgatcattgaaaacttcgaggcactcaagtcctggctcagcaagactctcgagcccatctgtgatgcagatccatccgccctagcaaaatatgttctggctttggtaaagaaagacaaaagtgaaaaagagttaaaggcattatgtattgatcagctggatgtatttcttcagaaagagacacagatatttgtggaaaaactttttgatgctgtgaatacaaagagttacctacctcctccagagcagccatcatcaggaagcctgaaggtagaattttttccacaccaagaaaaagatataaagaaggaagagatcactaaggaggaagagcgagagaagaagttttctagaaggctaaatcacagtcctccccagtcaagctcccgatacagggaaaatagaagccgtgatgagaggaaaaaagatgatcgttctcgcaaaagagattatgatcgaaaccctcctcgaagagattcatacagagaccggtacaatagaagacgagggcggagtcgcagttatagcaggagtcgaagtcgaagttggagtaaagagaggcttcgtgagagggacagagatagaagcaggactagaagcagaagcagaacacgaagcagggaaagggatctggtaaaacctaaatatgacctggatagaacagatccattagaaaataattatactccagtctcttcggtacctagtatttcatctggccactaccctgtacctactttgagcagcactattacagtaattgctcctactcatcatggaaacaacactaccgaaagttggtctgaatttcatgaagaccaagtggaccataactcttacgtaagaccacccatgccaaagaaacggtgtagagactatgatgaaaagggtttttgtatgagaggagacatgtgtccttttgatcatggaagtgatccagtagttgtagaagatgtgaatcttcctggtatgctgcctttcccagcacagcctcctgttgttgaaggaccacctcctcctggactccccccacctccaccaattcttacacccccacctgtgaatctcaggcccccagtaccaccgccaggtccattgccacccagtctcccacctgttacaggaccaccacctccacttcctcctttgcagccatctggcatggatgctcctccaaactctgcaaccagttctgttcctactgtagtaacaactggcattcatcaccagcctcctcctgctccaccctctctttttactgcagatacatatgacacagatggctacaatcctgaagccccaagcataacaaacacttccagacctatgtatagacacagagtgcatgcacaaaggcccaacttgataggactaacatcaggggatatggatttgccacccagagaaaagcctcccaataaaagcagtatgaggatagtagtggactcagaatcaaggaaaagaaccattggttctggagagcctggagttcctacaaagaagacttggtttgataaaccaaattttaatagaacaaacagcccaggctttcagaagaaggttcaatttggaaatgaaaataccaagcttgaacttagaaaagttcctccagaattaaataatatcagcaaacttaatgaacattttagtcgatttggaaccttggttaacttacaggttgcttataatggtgatcctgaaggtgccctaatccaatttgcaacatacgaagaagcaaagaaagcaatatcaagtacggaagcagtattaaacaatcgctttattaaggtttattggcacagagaaggaagcacccaacagttacaaactacttctccaaagcctttagtccagcagcccattttgcctgttgtgaagcagtcagtcaaagagcggctgggtccagtaccttcaagtactattgaacctgcagaagcccagagtgcctcttcagaccttcctcaggtgttgtctacatctactggcctaacaaaaacagtgtataatccagctgctttgaaggctgcacagaaaaccttacttgtttccacctctgcagttgataataatgaagcacagaaaaaaaaacaggaggcattgaaacttcagcaggatgtaaggaaaaggaaacaagaaattttagaaaagcacattgaaacacagaagatgttaatttcaaaactggagaaaaacaaaacaatgaagtctgaagataaagcagaaataatgaaaactttagaggttttgacaaaaaatattaccaagttgaaagatgaggtcaaagctgcttctcctggacgctgtcttccaaaaagtataaaaaccaagactcagatgcagaaggaattacttgacacagaactggatttatataagaagatgcaggctggagaagaagtcactgaacttaggagaaagtatacagaattacagctggaagctgccaaacgagggattctttcatctggtcggggcagaggaattcattcaagaggtcgaggtgcagttcatggccgaggcagggggcgagggcgagggcgaggtgtgcctggtcatgctgtggtggatcaccgtcccagggcattggagatttctgcatttacggagagcgatagagaagatcttcttcctcattttgcgcaatatggtgaaattgaagattgtcagattgatgattcctcacttcatgcagtaattacattcaagacaagagcagaagctgaagcagctgcagttcatggagctcgtttcaaagggcaagatctaaaactggcatggaataaaccagtaactaatatttcagctgttgaaacagaagaagttgagcctgatgaagaagaatttcaggaagagtctttggtggatgactcattacttcaagatgatgatgaagaagaagaggacaatgaatctcgttcttggagaagatgatttgactgatcattgatctgcatatgctagaactctacctgtgtttcattagtattatctaatgtacttttacatatttgtaaaaacaatttttggtaaaatgtgatgaagatggatttcacaaatagacaaaaaagaagaaaactaccttctgatcttgtattttgaaagattgatgtttgcattttacttcagtaaacaattgctaaagacatcacactagaaacatatgcaatgtttttattacatacttctactggacatcacagaattctttgggttctttgtaatttaatgaataggtctgaaaacttatgaccaatacttgttataacttagaggactttgttttattccaaataaggaatgaatttgcatttaaaatcttaatgaatgttttcaaaactgaatagataacatagtactctaactaaagtctccaagttatgtattataatattacatagtagtatgcttaggctttactatgtattagccttttgttggactgtgtatgtattttaccatatgggttttaatgataatggtgtatgactgctttacatgagtccttatgcatccagatgttataataaagtggaatggtctctttaaaaaaaaaaaaggaaagaaaagagaaaagcaatgacaaaaaaaaaaaaaaaaa

SEQ ID NO: 4420 - DNA, 3693 bp, Homo sapiens
  source 1..3693: mol_type = genomic DNA
tagcggccgcgacctgggcgggcggaggagtgtgacgggccttagggccgctgtggatggtttctaaaatgatcattgaaaacttcgaggcactcaagtcctggctcagcaagactctcgagcccatctgtgatgcagatccatccgccctagcaaaatatgttctggctttggtaaagaaagacaaaagtgaaaaagagttaaaggcattatgtattgatcagctggatgtatttcttcagaaagagacacagatatttgtggaaaaactttttgatgctgtgaatacaaagagttacctacctcctccagagcagccatcatcaggaagcctgaaggtagaattttttccacaccaagaaaaagatataaagaaggaagagatcactaaggaggaagagcgagagaagaagttttctagaaggctaaatcacagtcctccccagtcaagctcccgatacagggaaaatagaagccgtgatgagaggaaaaaagatgatcgttctcgcaaaagagattatgatcgaaaccctcctcgaagagattcatacagagaccggtacaatagaagacgagggcggagtcgcagttatagcaggagtcgaagtcgaagttggagtaaagagaggcttcgtgagagggacagagatagaagcaggactagaagcagaagcagaacacgaagcagggaaagggatctggtaaaacctaaatatgacctggatagaacagatccattagaaaataattatactccagtctcttcggtacctagtatttcatctggccactaccctgtacctactttgagcagcactattacagtaattgctcctactcatcatggaaacaacactaccgaaagttggtctgaatttcatgaagaccaagtggaccataactcttacgtaagaccacccatgccaaagaaacggtgtagagactatgatgaaaagggtttttgtatgagaggagacatgtgtccttttgatcatggaagtgatccagtagttgtagaagatgtgaatcttcctggtatgctgcctttcccagcacagcctcctgttgttgaaggaccacctcctcctggactccccccacctccaccaattcttacacccccacctgtgaatctcaggcccccagtaccaccgccaggtccattgccacccagtctcccacctgttacaggaccaccacctccacttcctcctttgcagccatctggcatggatgctcctccaaactctgcaaccagttctgttcctactgtagtaacaactggcattcatcaccagcctcctcctgctccaccctctctttttactgcagatacatatgacacagatggctacaatcctgaagccccaagcataacaaacacttccagacctatgtatagacacagagtgcatgcacaaaggcccaacttgataggactaacatcaggggatatggatttgccacccagagaaaagcctcccaataaaagcagtatgaggatagtagtggactcagaatcaaggaaaagaaccattggttctggagagcctggagttcctacaaagaagacttggtttgataaaccaaattttaatagaacaaacagcccaggctttcagaagaaggttcaatttggaaatgaaaataccaagcttgaacttagaaaagttcctccagaattaaataatatcagcaaacttaatgaacattttagtcgatttggaaccttggttaacttacaggttgcttataatggtgatcctgaaggtgccctaatccaatttgcaacatacgaagaagcaaagaaagcaatatcaagtacggaagcagtattaaacaatcgctttattaaggtttattggcacagagaaggaagcacccaacagttacaaactacttctccaaaggtaatgcagcctttagtccagcagcccattttgcctgttgtgaagcagtcagtcaaagagcggctgggtccagtaccttcaagtactattgaacctgcagaagcccagagtgcctcttcagaccttcctcagaatgtaactaagttatctgtgaaggacaggttgggttttgtatcaaagccatctgtttcagcaactgaaaaggtgttgtctacatctactggcctaacaaaaacagtgtataatccagctgctttgaaggctgcacagaaaaccttacttgtttccacctctgcagttgataataatgaagcacagaaaaaaaaacaggaggcattgaaacttcagcaggatgtaaggaaaaggaaacaagaaattttagaaaagcacattgaaacacagaagatgttaatttcaaaactggagaaaaacaaaacaatgaagtctgaagataaagcagaaataatgaaaactttagaggttttgacaaaaaatattaccaagttgaaagatgaggtcaaagctgcttctcctggacgctgtcttccaaaaagtataaaaaccaagactcagatgcagaaggaattacttgacacagaactggatttatataagaagatgcaggctggagaagaagtcactgaacttaggagaaagtatacagaattacagctggaagctgccaaacgagggattctttcatctggtcggggcagaggaattcattcaagaggtcgaggtgcagttcatggccgaggcagggggcgagggcgagggcgaggtgtgcctggtcatgctgtggtggatcaccgtcccagggcattggagatttctgcatttacggagagcgatagagaagatcttcttcctcattttgcgcaatatggtgaaattgaagattgtcagattgatgattcctcacttcatgcagtaattacattcaagacaagagcagaagctgaagcagctgcagttcatggagctcgtttcaaagggcaagatctaaaactggcatggaataaaccagtaactaatatttcagctgttgaaacagaagaagttgagcctgatgaagaagaatttcaggaagagtctttggtggatgactcattacttcaagatgatgatgaagaagaagaggacaatgaatctcgttcttggagaagatgatttgactgatcattgatctgcatatgctagaactctacctgtgtttcattagtattatctaatgtacttttacatatttgtaaaaacaatttttggtaaaatgtgatgaagatggatttcacaaatagacaaaaaagaagaaaactaccttctgatcttgtattttgaaagattgatgtttgcattttacttcagtaaacaattgctaaagacatcacactagaaacatatgcaatgtttttattacatacttctactggacatcacagaattctttgggttctttgtaatttaatgaataggtctgaaaacttatgaccaatacttgttataacttagaggactttgttttattccaaataaggaatgaatttgcatttaaaatcttaatgaatgttttcaaaactgaatagataacatagtactctaactaaagtctccaagttatgtattataatattacatagtagtatgcttaggctttactatgtattagccttttgttggactgtgtatgtattttaccatatgggttttaatgataatggtgtatgactgctttacatgagtccttatgcatccagatgttataataaagtggaatggtctcttt

SEQ ID NO: 4421 - DNA, 3621 bp, Homo sapiens
  source 1..3621: mol_type = genomic DNA
tagcggccgcgacctgggcgggcggaggagtgtgacgggccttagggccgctgtggatggtttctaaaatgatcattgaaaacttcgaggcactcaagtcctggctcagcaagactctcgagcccatctgtgatgcagatccatccgccctagcaaaatatgttctggctttggtaaagaaagacaaaagtgaaaaagagttaaaggcattatgtattgatcagctggatgtatttcttcagaaagagacacagatatttgtggaaaaactttttgatgctgtgaatacaaagagttacctacctcctccagagcagccatcatcaggaagcctgaaggtagaattttttccacaccaagaaaaagatataaagaaggaagagatcactaaggaggaagagcgagagaagaagttttctagaaggctaaatcacagtcctccccagtcaagctcccgatacagggaaaatagaagccgtgatgagaggaaaaaagatgatcgttctcgcaaaagagattatgatcgaaaccctcctcgaagagattcatacagagaccggtacaatagaagacgagggcggagtcgcagttatagcaggagtcgaagtcgaagttggagtaaagagaggcttcgtgagagggacagagatagaagcaggactagaagcagaagcagaacacgaagcagggaaagggatctggtaaaacctaaatatgacctggatagaacagatccattagaaaataattatactccagtctcttcggtacctagtatttcatctggccactaccctgtacctactttgagcagcactattacagtaattgctcctactcatcatggaaacaacactaccgaaagttggtctgaatttcatgaagaccaagtggaccataactcttacgtaagaccacccatgccaaagaaacggtgtagagactatgatgaaaagggtttttgtatgagaggagacatgtgtccttttgatcatggaagtgatccagtagttgtagaagatgtgaatcttcctggtatgctgcctttcccagcacagcctcctgttgttgaaggaccacctcctcctggactccccccacctccaccaattcttacacccccacctgtgaatctcaggcccccagtaccaccgccaggtccattgccacccagtctcccacctgttacaggaccaccacctccacttcctcctttgcagccatctggcatggatgctcctccaaactctgcaaccagttctgttcctactgtagtaacaactggcattcatcaccagcctcctcctgctccaccctctctttttactgcagatacatatgacacagatggctacaatcctgaagccccaagcataacaaacacttccagacctatgtatagacacagagtgcatgcacaaaggcccaacttgataggactaacatcaggggatatggatttgccacccagagaaaagcctcccaataaaagcagtatgaggatagtagtggactcagaatcaaggaaaagaaccattggttctggagagcctggagttcctacaaagaagacttggtttgataaaccaaattttaatagaacaaacagcccaggctttcagaagaaggttcaatttggaaatgaaaataccaagcttgaacttagaaaagttcctccagaattaaataatatcagcaaacttaatgaacattttagtcgatttggaaccttggttaacttacaggttgcttataatggtgatcctgaaggtgccctaatccaatttgcaacatacgaagaagcaaagaaagcaatatcaagtacggaagcagtattaaacaatcgctttattaaggtttattggcacagagaaggaagcacccaacagttacaaactacttctccaaaggtaatgcagcctttagtccagcagcccattttgcctgttgtgaagcagtcagtcaaagagcggctgggtccagtaccttcaagtactattgaacctgcagaagcccagagtgcctcttcagaccttcctcaggtgttgtctacatctactggcctaacaaaaacagtgtataatccagctgctttgaaggctgcacagaaaaccttacttgtttccacctctgcagttgataataatgaagcacagaaaaaaaaacaggaggcattgaaacttcagcaggatgtaaggaaaaggaaacaagaaattttagaaaagcacattgaaacacagaagatgttaatttcaaaactggagaaaaacaaaacaatgaagtctgaagataaagcagaaataatgaaaactttagaggttttgacaaaaaatattaccaagttgaaagatgaggtcaaagctgcttctcctggacgctgtcttccaaaaagtataaaaaccaagactcagatgcagaaggaattacttgacacagaactggatttatataagaagatgcaggctggagaagaagtcactgaacttaggagaaagtatacagaattacagctggaagctgccaaacgagggattctttcatctggtcggggcagaggaattcattcaagaggtcgaggtgcagttcatggccgaggcagggggcgagggcgagggcgaggtgtgcctggtcatgctgtggtggatcaccgtcccagggcattggagatttctgcatttacggagagcgatagagaagatcttcttcctcattttgcgcaatatggtgaaattgaagattgtcagattgatgattcctcacttcatgcagtaattacattcaagacaagagcagaagctgaagcagctgcagttcatggagctcgtttcaaagggcaagatctaaaactggcatggaataaaccagtaactaatatttcagctgttgaaacagaagaagttgagcctgatgaagaagaatttcaggaagagtctttggtggatgactcattacttcaagatgatgatgaagaagaagaggacaatgaatctcgttcttggagaagatgatttgactgatcattgatctgcatatgctagaactctacctgtgtttcattagtattatctaatgtacttttacatatttgtaaaaacaatttttggtaaaatgtgatgaagatggatttcacaaatagacaaaaaagaagaaaactaccttctgatcttgtattttgaaagattgatgtttgcattttacttcagtaaacaattgctaaagacatcacactagaaacatatgcaatgtttttattacatacttctactggacatcacagaattctttgggttctttgtaatttaatgaataggtctgaaaacttatgaccaatacttgttataacttagaggactttgttttattccaaataaggaatgaatttgcatttaaaatcttaatgaatgttttcaaaactgaatagataacatagtactctaactaaagtctccaagttatgtattataatattacatagtagtatgcttaggctttactatgtattagccttttgttggactgtgtatgtattttaccatatgggttttaatgataatggtgtatgactgctttacatgagtccttatgcatccagatgttataataaagtggaatggtctcttt

SEQ ID NO: 4422 - DNA, 6451 bp, Homo sapiens
  source 1..6451: mol_type = genomic DNA
gggttagttcctgttaggccccggccgggggagtaggttgaagtctcctaagatgcccggtgggctggggcaccgggagctgtgaagggaacgtgagggggcggcgtagtggagacccacggcaggcctgaagaagagcggcggccgagcccgccttccctgcaccatgctcatagaggatgtggatgccctcaagtcctggctggccaagttactggagccgatatgtgatgctgatccttcagccttagccaactatgttgtagcactggtcaagaaggacaaacctgagaaagaattaaaagccttttgtgctgatcaacttgatgtctttttacaaaaagaaacttcaggttttgtggacaaactatttgaaagtctctatactaagaactaccttccacttttggaaccagtaaagcctgagccaaaaccactagtccaagaaaaagaagaaattaaagaagaggtatttcaggagccagcagaggaagaacgagatggcagaaaaaagaaatatcctagtccccagaagactcgttcagaatctagtgaacgaaggacacgtgagaaaaaaagagaagacgggaaatggagagactatgaccggtactatgagcggaatgaattgtaccgtgagaagtatgactggagaagaggcaggagtaagagtcggagtaagagtcgaggcctgagtcgcagtagaagccgaagtagggggcgcagcaaagaccgggatccaaataggaatgttgagcacagggaaagatcgaagtttaagagtgaaaggaatgacctggagagttcctatgtgcctgtgtctgcaccacctccaaactcttctgagcagtattcctctggggcacagtctattcccagcactgttactgtgatcgcacctgctcaccactctgaaaacacaactgagagttggtctaattactataacaatcatagctcttccaattcttttggtcgaaacctaccaccaaagaggcgatgcagagattatgatgaaagaggattttgtgtacttggtgacctttgtcagtttgatcatggaaatgatcccctagttgttgatgaagttgctctgccaagtatgattcctttcccaccccctcctcctgggcttcctcctccaccacctcctggaatgttaatgcctccaatgccaggtccaggcccaggcccgggcccaggtccaggcccaggcccgggcccaggtccaggtcctggccatagtatgagacttcctgttccccaaggacatggtcagcctccaccatccgttgtgcttcccataccaagaccacctataacacaatcaagcttgataaacagccgtgaccagcctgggacaagtgcagtgcccaatcttgcatcagtgggaacaagactacctcctcctttaccccagaacctcctttacacagtatcagaacgacagcccatgtactctcgtgaacatggtgctgctgcatctgagcgacttcagttggggacaccgcctcctctgttggcagctcgtttggtgccacctcgaaacctcatgggatcctccattggataccatacctcagtctccagccctacccctctggttccagatacatatgaaccagatggttacaacccagaagctcctagtattactagttctggtagatctcagtacagacagttcttttcaagaactcagacacagcgtcccaatctgattggcctaacatctggagatatggatgtaaatccaagagctgctaacattgtgatccagactgaaccaccagttcctgtttcgattaatagcaacataaccagagtagttcttgaaccagatagtcgaaaaagagctatgagtggtttggaagggccactcacaaagaaaccttggctgggaaagcaaggaaataacaatcaaaataaaccagggttcttacgaaagaatcagtatacaaacaccaaattagaagtcaagaaaatccctcaggaattgaacaacattaccaagctcaatgaacacttcagcaaatttggaactattgttaatatccaggttgcttttaagggtgacccagaagcagccctaatccaatatcttaccaatgaggaggccaggaaagccatttctagcacagaagcagttctaaacaaccgattcattcgagtcttgtggcatagggaaaataatgagcaaccgacactacagtcctcagcacagctgctcctgcaacaacagcaaacacttagtcacctctcacagcagcaccatcacctgccacagcatctacatcagcagcaggtgctagtggcccagtctgctccttcaacagtgcacggaggtatccagaagatgatgagcaaaccacagacatcaggtgcatatgttcttaacaaagttcctgttaaacatcgtcttggacatgcaggtggtaaccagagtgatgcatcacatttgttgaatcagtctggtggtgctggagaagattgccagatattttcaactccaggccatccaaaaatgatttacagctcctcaaacttaaagacaccttcaaagctctgttcagggtctaaatctcatgatgttcaagaagtgcttaaaaaaaaacaggaagcaatgaagttacaacaagatatgaggaaaaaaagacaggaagtgttagaaaagcaaatagaatgccaaaagatgttaatatccaagttagaaaaaaacaaaaacatgaaaccagaagaaagagcaaatataatgaagactttgaaagagcttggagagaagatctcacaattaaaagatgaattaaaaacatcttctgcagtctccacaccatctaaagtgaagacaaaaacggaggcccagaaggagttattagatactgaactggacctccacaagaggctgtcctcaggagaagacaccacagaattacggaaaaaactcagtcagttacaggttgaggctgcacggttaggtattttacctgtgggtcgaggaaagaccatgtcctctcaaggtcgaggaagaggccgagggcgtggaggaagaggaaggggctcactaaatcacatggtggtggaccatcgtcccaaagcactaacagttggaggattcattgaggaagaaaaagaagacttgcttcagcatttctcaaccgcaaaccaagggccaaaatttaaagaccgtcggctacagatatcatggcacaagcccaaggtaccatctatatccactgagactgaagaagaagaagtcaaggaggaggaaacagaaacctcagatttgtttttgcctgatgatgacgatgaagatgaagatgaatatgagtctcgctcatggcgaagatgaaatctgatgctagctgtataatttttaggaatattgtttagaagaacaacttttaaaaattatttaaaagaagtcaatgagccaaaaaaaatttttttatttttcttttcaacacagtaggttcaagaacagcaagtttgctatttaaacacatctcataactgtacatgatattaaagcaccaaaggcctagtgacttttacacagttgtgaagatccacagcaatgacatggataatctctagagccttattttccacaccaccttttttttgttgctgttggtgttggattatgatgtaaatgacagggtgttcagaaattttattttggattataatctactgataaaatttaattaaatgtcaaaatcacctgtaatcttttaactctcagttgttatggatgggtcatcagacagtaggaaatatttgtaattaaaatacccttttgctttcaagagtggtcttggaagaaaaatatgtttattttaattttaatttttttttttttttactttggaggagcccaatttgtattcagtctaaatttgtttttcatggtttttatgtgtggtagtactagttcagtgaaaatcacaacaaactgtgtgttcttaaatgctacagcaatggtagctagctctatagtatttccattctcttgtcatatgaactcctggacttttcctgctactgattcttagtttgctttgatatttagtgagcgctggttcggctggtctttttaaaaatttttataactcagaatgtaaaaggctttcacctattgcccctttctcgtcccccttttcttcctcttgcctttctattaataggcctgacttagtcatcattgatataagtggttcatttgggcaaccgcaggcagtctccaataaaaggttcaaaccagcacctggataaataagtgatgttttgatgagaatgatggaaggattttggggagaagagaatcaccagctttattttttccctcttttgaagcttcagttcagtatagttacacagaagggtttaaaaatgtctgaaattcttttcctaaatttaaaccatgatggtgaggtgactggggggtggggggtggaggtgggagggggttgagggctgagtatgctagtaataaatgggagtcatatatgactttgttcagatgaccttattttttcataattttgtagcttgttgctatccatgaacatacgcatccctcagtagacagtttcctttactgtgtgcatttttactgtacactgtatagagtagagtatctgttaagtaaaatatatatgtaaatttatgtcttcgtgttctgaatgttagatggaaaagcagaggagcaacactacactgtactgacccctgggaaaataaaatgattaatgtacctaggctgtcactttttcaaggatatacacatctgtgtttttatatatgtgtggtatgaaaatttgaaacctcctgttgtctccaaaagggtcttggtgaccactatatcaaggattttgtttgctgaggtaaagacaatttctcaatatagaaactattcactaagaacttaaaaccatcaggattctagatttacttagctataagaagttaaatcccacgttctgataatctttattcttctacatgttttcctggaatgatgtgtcaaaccagggtcatttttaagttcatataattttctttcataataatgaggacttcctttttctaggttattgttatatttctagtaacactgaaggtaaaataagcttataaaagaaggaaaacatcagaatggtgtatctagaatacacaatcttgctccttactcctccatcatctctaatgaaatttttcttgatgtctgtggctcagtcagtatatattttgaaagattcattgtggtgaatattttgagtcctgacagtttaaacgtgatagagggaacaaaggatttatatattttttgtacaaagttttttcttaaactgtataattttgtaaataatttgtttgggttttttttttgtgtactaaaactaccagcgtatagatttcaataagaattgttgtatttttgtatttggaaactgaaaattacagtaaataaatggaactctaagaaaaatttcagtagacagttcaacagaatgagattccttttcatatgatttttttgacctcaaaatggacatcttatttcactctcagtaaaaagttgaaaatttgactttttagtattgggggcagaagatagaagtgtgttaaagtgaaaaacagttttttcagtaaggtttgaggccctttctataagttttcagtacaccttaaacaggactaaaaatactttaaaagtgtgctttcaaagaattttaaaacatgtttgactcaaagatgaatttgaagtgagttaattataatactggaaaacttcaggttagcataaaatagtttatatatatcccctgccccctttgggatttacttccaccatcaaatcttcaactgttagaatttcacttaaaagtgaataactgccatacatgttttcttggcatcttcatttacagaaataacatacagcatctaaagcaagttctgtccctcttaatgtgtatgacatctttttaagtagctgatcagcaataatagccaccagttgactaggtcagcctgatatactagtggatcactgtccaagataaaaaggtaaccccaagtattgcaaaatttccctcaatttctttatgtaacattgaagaaatgttgttaccagctaagatgataaattggaaaacagtcttgttaaggtgaaaggggtccttggtgatggatcattatttcaaaaaagaaaaaaatcatgtgaaaaggaatagtggttcctcttgatgtatagtatgcctgtattatagtttttacaaaattgtgaacttgtgtaatagtataataggagatattgttgaatttctaactgtttatacatttaaattcatatatgtaatgtttgttttatcaattacaatctgaatttctaagaagcatgttgacttttgcaataaagatgcaatatggaatggttcacaattgg

SEQ ID NO: 4423 - DNA, 2808 bp, Homo sapiens
  source 1..2808: mol_type = genomic DNA
acttccggaatctctcggcgtgtgagcttggttgtcctaccaaagccagcgtttcggctcgcgtgcgccggcctagtttgctcgcgtcctcacgcgctttgggtttcccggtctcatggccggcctgaccttatttgtgggccgcctcccgccctcggcccgcagtgagcagctggaggaactgttcagtcaggtggggccggtgaagcagtgcttcgtggtgactgaaaaagggagtaaggcatgtcgaggctttggctatgtcactttttcaatgctggaagatgttcagagggccctcaaggagattaccacctttgaaggttgcaagatcaacgtgactgttgccaagaaaaaactgaggaacaagacaaaggaaaaggggaaaaatgaaaactcagagtgcccaaagaaggagccgaaggctaaaaaagccaaagtggcagataagaaagccagattaattattcggaacctgagctttaagtgttcagaagatgacttgaagacagtatttgctcaatttggagctgtcctggaagtaaatatccctaggaaaccagatgggaagatgcgcggttttggttttgttcagttcaaaaacctcctagaagcaggtaaagctctcaaaggcatgaacatgaaagagataaaaggccggacagtggctgtggattgggccgtggcaaaggataaatataaagatacacagtctgtttctgctataggtgaggaaaagagccatgaatctaaacatcaggaatcagttaaaaagaagggcagagaggaagaggatatggaagaggaagaaaacgatgatgatgacgatgatgatgatgaagaagatggggtttttgatgatgaagatgaagaggaagagaatatagaatcaaaggtgaccaagcctgtgcaaattcagaagagagcagtcaagagaccagcccctgcaaaaagcagtgatcattctgaggaggacagtgacctagaggaaagcgatagtattgatgatggagaggaactggctcagagtgataccagcactgaggagcaagaggataaagctgtgcaagtctcaaacaaaaagaagaggaaattaccctctgatgtgaatgaagggaaaactgtttttatcagaaatctgtcctttgactcagaagaagaagaacttggggagcttctccaacagtttggagaactcaaatatgtccgcattgtcttgcatccagacacagagcattctaaaggttgtgcatttgcccagttcatgactcaagaagcagctcagaaatgccttctagctgcttctccagagaatgaggctggtgggcttaaactggatggccggcagctcaaggttgacttggcggtgacccgtgatgaggctgcaaagcttcagacgacgaaggtgaagaagccgactggcacccggaatctctatctggcccgagaaggcttgattcgtgctgggacgaaggctgcagagggtgtgagtgctgctgatatggccaaaagagaacggtttgagctgctgaagcatcagaaactcaaggaccagaatatctttgtctcccgaaccaggctctgcctgcacaatctcccaaaggctgtagatgacaaacagctcagaaagctgctgctgagtgctactagtggagagaaaggggtgcgcatcaaggagtgtagagtgatgcgagacctcaaaggagttcatgggaacatgaagggtcagtccctgggctacgcctttgcggagttccaagagcacgagcatgccctgaaagccctccgcctcatcaacaacaatccagaaatctttgggcctctgaagagaccaatagtggagttctctttagaagatcgaagaaaacttaaaatgaaggaattaaggatccagcgcagcttgcaaaaaatgagatccaagcctgcaactggtgagcctcagaaggggcaaccagagcctgcaaaagaccagcaacagaaggcagctcaacaccacacagaggaacaaagcaaggtgcccccagagcagaagagaaaggcgggctctacctcatggaccgggttccagaccaaggctgaagtggagcaggtggagctgcctgatggaaagaagagaagaaaggtcctggcgctcccctcacaccgaggccccaaaatcaggttgcgggacaaaggcaaagtgaagcccgtccatcccaaaaagccaaagccacagataaaccagtggaagcaggagaagcagcaattatcgtccgagcaggtatctaggaaaaaagctaagggaaataagacggaaacccgcttcaaccagctggtcgaacaatataagcagaaattattgggaccttctaaaggagcacctcttgcaaagaggagcaaatggtttgatagttgatgatggcagcaggctgggtaagaagctgggttgtgtactttctggtgacactcctgggctcctccccatcccccgtgtctctcactgagggaaagaaaatccccaagggcactgccactgtgctcggaggtgccctggactgtgtacatctgaactttggtccatcctttgatgtgtggttcgttagccacaaagagaaatatctgaaagtcaacatgatgcttcttgcatattatccagattattgtatgaagttgtgtctataattattaccaatttttattctttatttctcaaatggaaacacctgaaaaagcattctggagtgctgaatttttaagatgtatattttgttaagcatattctctaaatgagatattgtgtggctttttagtaacaacgtcatttctaat

SEQ ID NO: 4424 - DNA, 547 bp, Homo sapiens
  source 1..547: mol_type = genomic DNA
cttcccacatgctttcagaagtggagcatgcctcatttctttctcttgcttttcatcattgtccatatcaggtcattttcagtcaggcacaggaagtgcagttttccactgtagtttggataggttcagtactctaaaataaaaccagtcactgcagatagatttccattgcagaagattcttccataaagaagtgatctgtagaacacttgcttctttatcccaccatatagtcttattagttgtgcagggaggagagagcgatggcttttttcacccagaaggccagccccagcggcttccccagcctccggaagtgggaccacagcctgcccgcaaggtgacgctgaccagggggggcctccagcagcccccacatctgccagcggggccccacgcacactcgcctgtccctccagggatcaaaagcatccaaggaattcacccggcgaagaaggccatcatgcacggacgaggcagaggagtggccggtcccatgggccgggggcgcctgatgccaaacaagcagaacctgcgggtggtggag

SEQ ID NO: 4425 - DNA, 1404 bp, Homo sapiens
  source 1..1404: mol_type = genomic DNA
cccggaatcgacctatggccagcagtcgtccccgccctgcttcaaacatttgggtttcaggagccgggcggaggtgactgccgcgtgtttgcgttgcacgcccaccgcccgaaacacggcggcggcctcagggctgctgcggcctcggcgggggcaggccccggcgcccgcccgcctcccggcctccatcatcccagggtgcaccgcggcgggcgcgggcgcgcggccatgttgcggtagtttgttgttttcttcctgcggaggcgaagggccagctgtggaccgcgaagcgcccggcttcgcctctgcctcctgcagccccctcccttctctgtcctccgtcacccgtacccgggcccggaccaggcacgtcggcccaccagctggcttggtgggggaggctgaaggccgggccccgcgagtgccatggcggccgccctgggagcgagcggaggagcaggcgccggagatgatgactttgaccagtttgataagcctggcgcggaacggtcgtggagaagaagagctgctgatgaggactgggacagtgaacttgaagatgatttacttggagaagatttgctatctggcaaaaagaatcagtcggatttgtcagatgaagagctaaatgatgatcttttgcagagtgataatgaagatgaagaaaatttcagttctcagggtgttacaattagtctgaatgctacatctggcatggttacatcatttgaactctctgacaacactaacgaccaatctggagaacaggaatctgagtatgaacaagaacaaggagaggatgaactggtttatcacaaatctgatggatcagaattgtatactcaagagtacccagaagaaggacagtatgaaggccacgaagctgagttgacagaagaccaaatagaatatgtggaagagccagaggaggagcagctttacactgatgaagtgttagacatcgagatcaatgaacctttagatgaatttacaggaggtatggaaacattggaacttcaaaaggacatcaaagaagaatcagatgaagaagaagaagatgatgaagaatctggacgattacgtttcaaaactgaaaggaaagaaggaacaattattaggctctcagatgtaactagagagagaaggaacattccagaaactttgggtaacttttttgcctgtctcccatcctcctttactctcatttcaacttcctccatagtattgctgtaattaatcaaagtaggcaaagaaggttgactaggtaattgcggctgccgtccggagagtggccggactttggagtgagtgctgtttatggtactgtaaaactcattctttaaaatcattgctgtttatggatttaaaatgcttgaataaaatgtttaagataattaaaaaaaa

SEQ ID NO: 4426 - DNA, 10149 bp, Homo sapiens
  source 1..10149: mol_type = genomic DNA
atgttgcggtagtttgttgttttcttcctgcggaggcgaagggccagctgtggaccgcgaagcgcccggcttcgcctctgcctcctgcagccccctcccttctctgtcctccgtcacccgtacccgggcccggaccaggcacgtcggcccaccagctggcttggtgggggaggctgaaggccgggccccgcgagtgccatggcggccgccctgggagcgagcggaggagcaggcgccggagatgatgactttgaccagtttgataagcctggcgcggaacggtcgtggagaagaagagctgctgatgaggactgggacagtgaacttgaagatgatttacttggagaagatttgctatctggcaaaaagaatcagtcggatttgtcagatgaagagctaaatgatgatcttttgcagagtgataatgaagatgaagaaaatttcagttctcagggtgttacaattagtctgaatgctacatctggcatggttacatcatttgaactctctgacaacactaacgaccaatctggagaacaggaatctgagtatgaacaagaacaaggagaggatgaactggtttatcacaaatctgatggatcagaattgtatactcaagagtacccagaagaaggacagtatgaaggccacgaagctgagttgacagaagaccaaatagaatatgtggaagagccagaggaggagcagctttacactgatgaagtgttagacatcgagatcaatgaacctttagatgaatttacaggaggtatggaaacattggaacttcaaaaggacatcaaagaagaatcagatgaagaagaagaagatgatgaagaatctggacgattacgtttcaaaactgaaaggaaagaaggaacaattattaggctctcagatgtaactagagagagaaggaacattccagaaactttggagctttcagcagaggccaaggcagcattgcttgaatttgaagaaagggagcgacagcataaacaaggacgctacagctccaggcggggaggacggcgaggaggtccgctgatgtgtcgtggtgtgggggaccagaggagagagagcaccgagaggggcaggatgaaggaccacagacctgcgctgcttcctacacagcctcctgtcgtgccccaggctccccctccaccgccaccgccgcctcagcagcagccgatcagaagcctgttccagccgcagccgctgcagccgctgcttccggtgcagcacccgcaccacccatccccgcctcagggaatgcacatgcctccccagctagagaccccaaggatgatgatgaccccgccacccgtgactccacagcagcccaagaacatacacatcaacccgcacttcaaagggacggtggtcacgcctgttcaagtgcccttgctaccagttccgagccagccgagacctgccgtgggaccccagagattcccaggccctccagaatttccacagcatacacctggacctgttcccaacagtttcagccagcccccacgactccctctccaggaccagtggagagccccacccccgcctcaggatcgagaccctttcttcttaggagtttcaggtgaaccaagattcccgagccatctttttctggaacagcgaagtccccctccaccaccaccgcctcctacccttcttaacagtagccatcctgttcctactcagagtcctctaccattcactcagccaggaccagcatttaatcagcaaggacagcagccagtgttcccaagagagcggcccgtacgaccagccttgcagcctccaggtccggtggggattctgcactttagccagcctgggtcggcaaccacacggcccttcattcctcctagacagccgttcctgccaggcccaggacagccgtttctgcccacacacacacagcccaacctgcaggggccgttgcatcctccattgccccctccgcatcagcctcagcctcagcaacctcagcaacagcccccgccacagcaccagcctccgcaccagcccccgcaccagcccccgccccagcaccagcccccaccccagcacccaccacagcacccgccgcagcaccagcaccaccaccaccaccaccacctgtccgtcccgccccctcctttgatgccgatgtctcagccacagttccggcctcacgtacagaccgctcagcctcaggccagcagcagccggatgcagtgcccccagcgccaggggctccggcataatacaacttctcagaatgtaagcaagcggcccatgcagcaaatgcagcccactgcgccaaggaacagcaatttgcgtgaattacccatagcgccgtcacacgtgatagaaatgagcagcagccgctgctctgccacgccctcagcacaagtgaaacctatcgtcagcgcgtcaccaccctcgcgggccgtggcgggttccagaagctcacagggaaagacggaagtgaaagtcaagccagctagccctgtggctcaacctaaagaagaggcaaaaacagaaacagagtttcctgatgaagatgaggaaacaaggttatatcgcttaaagatagaagaacagaaacgcctaagagaagaaatcctgaaacagaaggagttacggcggcagcagcaggctggtgccaggaagaaggagctgctggagagactcgcgcagcaacagcagcagctgtacgctcccccacccccagcagagcaggaagagcaggcactgtcaccatcacccaccaacggtaacccactgttgccctttccaggtgcacaggtcagacaaaatgtgaagaacagacttcttgttaaaaaccaggatgtcagtatttcaaacgttcagcccaaaacatccaattttgtaccatccagtgccaacatgcagtatcaaggacaacagatgaaagcactgaaacatttgagacagaccagaacagttcctcaaagtcagactcagccgctgcataaagtgctcccgatcaaacctgcagatgtggaggagccagctgtcccccagactcctcgagtggcgtccatccagggccggccccaggacacaaagcctggcgtgaaaaggactgtcacgcacaggacaaacagtggtggtggagacgggccccacatcagctccaaggtcagggtgattaagctgtcaggtgggggaggagagagcgatggcttttttcacccagaaggccagccccagcggcttccccagcctccggaagtgggaccacagcctgcccgcaaggtgacgctgaccagggggggcctccagcagcccccacatctgccagcggggccccacgcacactcgcctgtccctccagggatcaaaagcatccaaggaattcacccggcgaagaaggccatcatgcacggacgaggcagaggagtggccggtcccatgggccgggggcgcctgatgccaaacaagcagaacctgcgggtggtggagtgcaagccccagccctgcgtggtgtctgtggaggggctgtcctcgtccaccacggatgcccagctgaagagcctgctgatgtcagtgggacccattcagagtttacagatgcttcctcagcaacggaaagccatagctaagttcaaggagccagcccacgcattagcatttcagcagaaattccacaggcatatgatagatttgtcccacataaatgtggccctgatcgtggagtgagtcctaacaagagagcctgaccttaggctgtacacacactgtggaatttcttcaagggagctgccggccggcgcagaacccccaggagcacaggtctctccgggccgctgtcctgcgtaactgttctccagagcgccagccagccacgggcctgattccagaggagccgaactgacaggacacagcaggctggagttggtgttagattgcttcacattctcttgtcaccaccaagaactccaagtttttcgttttgttttgttttcaaagtgcttacaatgcatgtagacattgttctttgtggtctgactctatgatcgatcacagtgacttagattcaggaaagaacattaacgtcacaagttctaagtagttttcacagcaaagaatatttgataatggttgcacttatcttcagtgcaggttagaagagtcttctcaaccaagcttaactcgagttgtcttctcagccctcaaaaggctcttgtacaaaatgtagattaaaatttgggtgattgttgattgacctttgcataccctggaaagccagggtgtgagtggggtggttgggagtggtgccagttgaacagcagattctgcttcttgtcactgtttcaaaagcgtcaactctgtgttcctagtttcgatgaactccccattcatttttaacacacttcccagataaggcaatgtgctggacaggcacacggcatggccctcggctagagcagggtctgtgatggcctcacctggcagccctctggcctagttcccaccacacatgaggtggtggaatggcctgaaggtggaacagacctgtttttttcctttttaaatgcagtaaggtggcctgtttatcactggctctgtgatacatgacattctttgggaatttggtggccactgcttcagtcacctctgtttttctgaaggctgttccagcagggctgccctgttcatcagcggatgttcactctggcctgccgttccccgtggcatgcggggtgagggtggctttcttccagccccaaatgagacgagtctgtgtcatcattgaaactgcttttcgtaattgcgggtaggttcctgtaggtgagacatattctccataaagctactgtagtagaattcattctgggcaaacactgaaaaaagtgccttacagtatttctgctcatgaaagagtttcactattttggatatattctaaagtggacctgagctatttgagcaaataatgatagggcatactcagacattttagctaccttttatacctacgatttcatgtcacatttactaatagaattaagggaaatagaagcccgttctttcttactgcccctggagggagcatggcgctagggctctcagcctcctagaaggaagggactaaggagacgggcacagacttgcgtcatctcgtttccacagttgacgttttatattactttctcaaattaagttaccaaaacaaactgaagagctgaagcaggtcttccagaccctgcgatcctttctgtagcagtgattctaaagtggcgtttgctgtgtgcttgagagtaacactgcacgctgcaggggctgttgcagcagtcagtcccaggaagccacagcgcttgtaggatctgctaggaccctgcagctgtgctgccgccacctctgctccagagtgtcccagccaaccctcggaagatgggattgccagtcagccctgcctcaccatgcctgcaggaggctgtccagggagcaggtctgtgtgcccatcagcaggttcccatggctgtcactgcccactcatttccacagttagatacggatgtgttgatgtatttcgtctagtttatttggctcagtccacagctgcgttggagtggtgactttggtagcccttgagctctaattaagagagatccaaaccactcagtacccactgggcagtgggaaggcctaccgacttactttatcattgagggcttactgatacaatgaaatgagtttcatgactttttttttttttaaacactttttgaaatagagtgtgctgtgtttaaaaccaaaaatatgcatgttgtctctgaaaagtaggcattgaaacagacttttttgtagtcagtgttaataaaacggatcctgtttgggccttcattgttaaggtggacttcatggccactggaaggtctgttttggtgttacctgagtgtgacacaggccctggggtgtgcgtgtttctctaactgtctacacgtgcacataggcagactttctcatagaatgttcttgaaaggtgattggcaaagtcatgcaggcccgccttaaagcgctgattagaacagtccaacacagtccgacctcactcaatacccacaaccatcgaaaatggattcttagtaccagacaatcccagtaatgaaggtttagtttccttgaaggaaactacagaaaaggaaagaagcagaatgagaaaggaatggtacttaggtgtttggtatgctgctcacgtgaagtcagcccacaccagccaaaccctcgtggaagatctgctgcaaccattatctttgttcttgagttcatcatgcatttaaaatgagatgcaagagcatttagcataccatgtaaatatggaccttttaaaattaaaatactattggaagtgctttcaactcagccacatcttagctattagttctttgtgttgtcttatcaaagtttaatggatacagttccacagttgttgatgtgtttgtgtgtatattcgatttttataaagatggtagtaagtcaatacatttatcctgatctgtgtattatttgttcacaaattcaagaagcttaaaggtcgtaaatatcagtatctcataaggtaaaccaatagctgattatgtggagccaagttacttcttttctttttgcattatcttgttttggttttgtgctgtaatagaagttcacttagctactttagataaccttgcattaccactggtctggccacgtttgttaaatccttatactgatattcttctaaagagtaaatctcatcatttttccagacaaattttgaggggtttctctgttttgtggacaggcagcagcctccgtaggcacccgcaccctgccttgctggaggagatgggatggggcgggaggtggcttcaccataactatttttaatatgggtcattcttagcatgatttgtaaaggtctcaggcaaacagttgttgaagcttgcttctgtggcatttctgaattgtggcagagcttagatcctgcacccaggggtctttttttcaaacagcatcttgctcagttctgtgaacagaaggctttgttactgaaggaggtggaagaggagtttagggtgaaaaggaggaagggatggacagacccaggtgaggagaggcctggggattggggaagctgtcatctcagtgttaataatcaacttgcttctaacacactggcttatcaggggaggtcatccagtccggtcggtggagttgagagcccttgggccagggtgtttggcggcacaggggcatccgctggatggcctggaggagtgggggaggggaacgtcttcactgggtggtgatcagctgggacagttcaggtagggcaggtgagggacccccgaggccctggagccttgtcctgggatgggtttgaagaactcatcactcatcacttgttttcttttggcttttgttgtttttgttttgttctgtttgttttgttttgtatttctttgttattttattgggaaggtaagcggaatgtgctcatagaccatcagacgcttgtcgaaggcaggtcctagtcatgtaattgcacaggacaaggaggtcagcgtgtgtgatggcagcatgctgtgccggcacatcgtggagtcctagaaactctctagtccctgcggctgttcccctcctctgctctctccctggagaggactgccagctcttaagaaacattcctggtgcggtgtctgcagtgccctttgtgggtgacttcaggcttcccgctttcgtggtgctcttcctgggattcgtttttttattaccctccctccctacttgtaggcctcagctatggcttgacgtaatcgcttttagacccaggttggcttcccttcattaagctatgatcctccaccccattttttttttttttaatttggagtgggagggaggggggtgggcgagagaaagctcgaaaggtattattggtttttcaaaaaattagaggtgacgattctaccagggagttgactgataggagtgtgtgcagggcaggaaaggttcggaggcacccgactaccaccactcggaaagccgctagtccagatcgactagggagaggcttagatactttagtgtatttaaagagcatttcagttaactttttcagctatttttaaagtttgtgaatggagtgttattttggacattcttaaatatgaattctccaaaggcatttagccttgacttaatattaaatcctaaggattttatgtaaggtttttttgcaacctatttaattttttttaaatgcctaacttctgaggtgcataagcccgtggtttgtgtactggaactaaagcggaactcactgattcatattggatccccaggtataccttctgctggtagcatatggctggaaaaggccgtttgcctcacacattgtaacctgccttggctagaaaatgcttttaatgtctcaactctctcttttctgtgtcatgttttggtaggaaatctttaagattggcggacggaacaggtattttagtgagacacttctgagtacttgctttttcctttgacttctaaccaactaaaagagaaggaggtcttcatgttgatattttgcttggttttattttactgattttaaaaggtatatagaaaaatgtaggcctttaaaaagaaacagcatgtagttttttattttaatatgttccatagagtggataggcagacaggtactattgtaatgtattctgtatttaataatttaatatactctagaaagtagacctcatgcattcttttagcatgattttcttttaaactgcttttcattttaagggcacccgtggcggaagctggttttgcaaggactgtgtaagctgtatgcgttctagctgtatgcgttctgtagtcttttcttaggtgggtaacattttcaataacgcgcgcacagcacacaggggtgccctgagccgaaggagcaaaaaaagccaccgctcgtttctataatccagctttgcttttcacaggcgtgggatccaggatggtgtcctctgtgaggacttgaactctggggctttaattccactgtttaattttcaggtaccacagcagcaaagcacagagtgtgacctttttcatgtctgagctgattctgtttgctccacgtgcctgcttcttgctactgttcatttagtaatgggatcacctcaccatgccatgctctgggctctccctctctgtccatttctgttttgctttcctggctaaacccatctaccattcttaacactggtagctcctgtcccattccaagactcactctctcagaccttcccatctccctggctttccatgctcctctccctccacctcctggcttcaactgggtgagggccgtattcctgccactctgctccgcctcagccttgagaactccacgtgggctgggtgggaaggtgctgacgattttcacactgtgtttaccactccatcacctctcaacctttgcttcgacaggtcttcactcacgatttattcctccaggtctttgattggagagagtaactttttaattctgttgttttgcagtttggctctgtaggagtgagtggcgattcaaagatgccggcgtcccgcagtgtgcggttcgtgcccttaaccacccgcttctttgtttcccgcccctctgctttcgcaggagctcttgtgcttgagttcagtgttagtggtagcgtggctcactccacttggaggtggcggccgtctgaccgtgtgttactgctttgccgacggggcctcccggccctgatgcgtgtacactctgcgggctgcaccgggtggctctggttgggggcgaagctgtgttgactgggagagcgttggaaattgagacatggagagatgacgggagtgcgtttctctgggtttgatctccatcctgttttctcccagacacaccacacctaccttgggggaatgccgttgcctgttccacccctttgttcacttcgcgttaactgctgtggtaactttttcaggatctgtgtgaagaatggtaatgacgtagttgaaaggaaaatgtactgttgtgtgtttcatttgtgtgatttcgtaccaaaaaaatgtgtttgaactatattgtatgtaatttggaagtcgtgttaataaaaccctgcagtttcc

SEQ ID NO: 4427 - DNA, 7058 bp, Homo sapiens
  source 1..7058: mol_type = genomic DNA
attgcagaagattcttccataaagaagtgatctgtagaacacttgcttctttatcccaccatatagtcttattagttgtgggaggagagagcgatggcttttttcacccagaaggccagccccagcggcttccccagcctccggaagtgggaccacagcctgcccgcaaggtgacgctgaccagggggggcctccagcagcccccacatctgccagcggggccccacgcacactcgcctgtccctccagggatcaaaagcatccaaggaattcacccggcgaagaaggccatcatgcacggacgaggcagaggagtggccggtcccatgggccgggggcgcctgatgccaaacaagcagaacctgcgggtggtggagtgcaagccccagccctgcgtggtgtctgtggaggggctgtcctcgtccaccacggatgcccagctgaagagcctgctgatgtcagtgggacccattcagagtttacagatgcttcctcagcaacggaaagccatagctaagttcaaggagccagcccacgcattagcatttcagcagaaattccacaggcatatgatagatttgtcccacataaatgtggccctgatcgtggagtgagtcctaacaagagagcctgaccttaggctgtacacacactgtggaatttcttcaagggagctgccggccggcgcagaacccccaggagcacaggtctctccgggccgctgtcctgcgtaactgttctccagagcgccagccagccacgggcctgattccagaggagccgaactgacaggacacagcaggctggagttggtgttagattgcttcacattctcttgtcaccaccaagaactccaagtttttcgttttgttttgttttcaaagtgcttacaatgcatgtagacattgttctttgtggtctgactctatgatcgatcacagtgacttagattcaggaaagaacattaacgtcacaagttctaagtagttttcacagcaaagaatatttgataatggttgcacttatcttcagtgcaggttagaagagtcttctcaaccaagcttaactcgagttgtcttctcagccctcaaaaggctcttgtacaaaatgtagattaaaatttgggtgattgttgattgacctttgcataccctggaaagccagggtgtgagtggggtggttgggagtggtgccagttgaacagcagattctgcttcttgtcactgtttcaaaagcgtcaactctgtgttcctagtttcgatgaactccccattcatttttaacacacttcccagataaggcaatgtgctggacaggcacacggcatggccctcggctagagcagggtctgtgatggcctcacctggcagccctctggcctagttcccaccacacatgaggtggtggaatggcctgaaggtggaacagacctgtttttttcctttttaaatgcagtaaggtggcctgtttatcactggctctgtgatacatgacattctttgggaatttggtggccactgcttcagtcacctctgtttttctgaaggctgttccagcagggctgccctgttcatcagcggatgttcactctggcctgccgttccccgtggcatgcggggtgagggtggctttcttccagccccaaatgagacgagtctgtgtcatcattgaaactgcttttcgtaattgcgggtaggttcctgtaggtgagacatattctccataaagctactgtagtagaattcattctgggcaaacactgaaaaaagtgccttacagtatttctgctcatgaaagagtttcactattttggatatattctaaagtggacctgagctatttgagcaaataatgatagggcatactcagacattttagctaccttttatacctacgatttcatgtcacatttactaatagaattaagggaaatagaagcccgttctttcttactgcccctggagggagcatggcgctagggctctcagcctcctagaaggaagggactaaggagacgggcacagacttgcgtcatctcgtttccacagttgacgttttatattactttctcaaattaagttaccaaaacaaactgaagagctgaagcaggtcttccagaccctgcgatcctttctgtagcagtgattctaaagtggcgtttgctgtgtgcttgagagtaacactgcacgctgcaggggctgttgcagcagtcagtcccaggaagccacagcgcttgtaggatctgctaggaccctgcagctgtgctgccgccacctctgctccagagtgtcccagccaaccctcggaagatgggattgccagtcagccctgcctcaccatgcctgcaggaggctgtccagggagcaggtctgtgtgcccatcagcaggttcccatggctgtcactgcccactcatttccacagttagatacggatgtgttgatgtatttcgtctagtttatttggctcagtccacagctgcgttggagtggtgactttggtagcccttgagctctaattaagagagatccaaaccactcagtacccactgggcagtgggaaggcctaccgacttactttatcattgagggcttactgatacaatgaaatgagtttcatgactttttttttttttaaacactttttgaaatagagtgtgctgtgtttaaaaccaaaaatatgcatgttgtctctgaaaagtaggcattgaaacagacttttttgtagtcagtgttaataaaacggatcctgtttgggccttcattgttaaggtggacttcatggccactggaaggtctgttttggtgttacctgagtgtgacacaggccctggggtgtgcgtgtttctctaactgtctacacgtgcacataggcagactttctcatagaatgttcttgaaaggtgattggcaaagtcatgcaggcccgccttaaagcgctgattagaacagtccaacacagtccgacctcactcaatacccacaaccatcgaaaatggattcttagtaccagacaatcccagtaatgaaggtttagtttccttgaaggaaactacagaaaaggaaagaagcagaatgagaaaggaatggtacttaggtgtttggtatgctgctcacgtgaagtcagcccacaccagccaaaccctcgtggaagatctgctgcaaccattatctttgttcttgagttcatcatgcatttaaaatgagatgcaagagcatttagcataccatgtaaatatggaccttttaaaattaaaatactattggaagtgctttcaactcagccacatcttagctattagttctttgtgttgtcttatcaaagtttaatggatacagttccacagttgttgatgtgtttgtgtgtatattcgatttttataaagatggtagtaagtcaatacatttatcctgatctgtgtattatttgttcacaaattcaagaagcttaaaggtcgtaaatatcagtatctcataaggtaaaccaatagctgattatgtggagccaagttacttcttttctttttgcattatcttgttttggttttgtgctgtaatagaagttcacttagctactttagataaccttgcattaccactggtctggccacgtttgttaaatccttatactgatattcttctaaagagtaaatctcatcatttttccagacaaattttgaggggtttctctgttttgtggacaggcagcagcctccgtaggcacccgcaccctgccttgctggaggagatgggatggggcgggaggtggcttcaccataactatttttaatatgggtcattcttagcatgatttgtaaaggtctcaggcaaacagttgttgaagcttgcttctgtggcatttctgaattgtggcagagcttagatcctgcacccaggggtctttttttcaaacagcatcttgctcagttctgtgaacagaaggctttgttactgaaggaggtggaagaggagtttagggtgaaaaggaggaagggatggacagacccaggtgaggagaggcctggggattggggaagctgtcatctcagtgttaataatcaacttgcttctaacacactggcttatcaggggaggtcatccagtccggtcggtggagttgagagcccttgggccagggtgtttggcggcacaggggcatccgctggatggcctggaggagtgggggaggggaacgtcttcactgggtggtgatcagctgggacagttcaggtagggcaggtgagggacccccgaggccctggagccttgtcctgggatgggtttgaagaactcatcactcatcacttgttttcttttggcttttgttgtttttgttttgttctgtttgttttgttttgtatttctttgttattttattgggaaggtaagcggaatgtgctcatagaccatcagacgcttgtcgaaggcaggtcctagtcatgtaattgcacaggacaaggaggtcagcgtgtgtgatggcagcatgctgtgccggcacatcgtggagtcctagaaactctctagtccctgcggctgttcccctcctctgctctctccctggagaggactgccagctcttaagaaacattcctggtgcggtgtctgcagtgccctttgtgggtgacttcaggcttcccgctttcgtggtgctcttcctgggattcgtttttttattaccctccctccctacttgtaggcctcagctatggcttgacgtaatcgcttttagacccaggttggcttcccttcattaagctatgatcctccaccccattttttttttttttaatttggagtgggagggaggggggtgggcgagagaaagctcgaaaggtattattggtttttcaaaaaattagaggtgacgattctaccagggagttgactgataggagtgtgtgcagggcaggaaaggttcggaggcacccgactaccaccactcggaaagccgctagtccagatcgactagggagaggcttagatactttagtgtatttaaagagcatttcagttaactttttcagctatttttaaagtttgtgaatggagtgttattttggacattcttaaatatgaattctccaaaggcatttagccttgacttaatattaaatcctaaggattttatgtaaggtttttttgcaacctatttaattttttttaaatgcctaacttctgaggtgcataagcccgtggtttgtgtactggaactaaagcggaactcactgattcatattggatccccaggtataccttctgctggtagcatatggctggaaaaggccgtttgcctcacacattgtaacctgccttggctagaaaatgcttttaatgtctcaactctctcttttctgtgtcatgttttggtaggaaatctttaagattggcggacggaacaggtattttagtgagacacttctgagtacttgctttttcctttgacttctaaccaactaaaagagaaggaggtcttcatgttgatattttgcttggttttattttactgattttaaaaggtatatagaaaaatgtaggcctttaaaaagaaacagcatgtagttttttattttaatatgttccatagagtggataggcagacaggtactattgtaatgtattctgtatttaataatttaatatactctagaaagtagacctcatgcattcttttagcatgattttcttttaaactgcttttcattttaagggcacccgtggcggaagctggttttgcaaggactgtgtaagctgtatgcgttctagctgtatgcgttctgtagtcttttcttaggtgggtaacattttcaataacgcgcgcacagcacacaggggtgccctgagccgaaggagcaaaaaaagccaccgctcgtttctataatccagctttgcttttcacaggcgtgggatccaggatggtgtcctctgtgaggacttgaactctggggctttaattccactgtttaattttcaggtaccacagcagcaaagcacagagtgtgacctttttcatgtctgagctgattctgtttgctccacgtgcctgcttcttgctactgttcatttagtaatgggatcacctcaccatgccatgctctgggctctccctctctgtccatttctgttttgctttcctggctaaacccatctaccattcttaacactggtagctcctgtcccattccaagactcactctctcagaccttcccatctccctggctttccatgctcctctccctccacctcctggcttcaactgggtgagggccgtattcctgccactctgctccgcctcagccttgagaactccacgtgggctgggtgggaaggtgctgacgattttcacactgtgtttaccactccatcacctctcaacctttgcttcgacaggtcttcactcacgatttattcctccaggtctttgattggagagagtaactttttaattctgttgttttgcagtttggctctgtaggagtgagtggcgattcaaagatgccggcgtcccgcagtgtgcggttcgtgcccttaaccacccgcttctttgtttcccgcccctctgctttcgcaggagctcttgtgcttgagttcagtgttagtggtagcgtggctcactccacttggaggtggcggccgtctgaccgtgtgttactgctttgccgacggggcctcccggccctgatgcgtgtacactctgcgggctgcaccgggtggctctggttgggggcgaagctgtgttgactgggagagcgttggaaattgagacatggagagatgacgggagtgcgtttctctgggtttgatctccatcctgttttctcccagacacaccacacctaccttgggggaatgccgttgcctgttccacccctttgttcacttcgcgttaactgctgtggtaactttttcaggatctgtgtgaagaatggtaatgacgtagttgaaaggaaaatgtactgttgtgtgtttcatttgtgtgatttcgtaccaaaaaaatgtgtttgaactatattgtatgtaatttggaagtcgtgttaataaaaccctgcagtttccactctg

SEQ ID NO: 4428 - DNA, 2054 bp, Homo sapiens
  source 1..2054: mol_type = genomic DNA
gcttcaaccactcccagaagacgtccttcactcccaaaatgaggcttttctgaaacggcgaggaccaccaaccgacggcgacaaacctgctccctcacccagcgcctcccttcgccgccgcccggcggccgactgccggaggggagggggcgtggccagagagcggaagtgcccggaacccggaagtgcgagctggcgcgcagctgcagtctgggagtctttggagtaagaatggccttggaagggatgagcaaacggaagagaaagagaagtgtccaggagggagagaatcctgacgacggcgttcgcgggagtccgccggaagactacaggcttggacaggtcgccagtagcttatttcgcggcgaacaccattccagaggtggcaccggtcggctggcgtccctcttcagttctctggagccccagattcaacccgtgtacgtgcctgtgcctaaacaaaccatcaaaaaaacgaaacggaatgaggaggaagaaagtacatcccagattgaaagaccactttcgcaagaacctgccaaaaaagtgaaagcgaagaagaaacacactaacgcagaaaaaaagttggcagacagggaaagcgctctagcgagtgctgatttagaagaagaaattcaccagaaacaagggcagaaaaggaaaaattctcaacctggtgttaaagtagcagatagaaaaatacttgatgacacagaagacacagttgtcagtcaaagaaagaaaattcaaatcaaccaagaagaagagagattaaagaatgagagaactgtgtttgttgggaatttgcctgttacatgtaataagaagaagctgaagtcgttttttaaagagtatggacaaatagaatctgtacgatttcgttctctgattccagcagagggaacgctatccaaaaagttggcagcaataaaacgtaaaattcatcctgatcagaaaaatattaatgcctatgttgtgtttaaggaggagagtgctgccacgcaagcattgaaaagaaatggggcccagattgcagatggatttcgtattagagttgatctcgcatctgagacctcatctagagacaagagatcggtttttgtggggaatctcccttataaagttgaagaatctgccattgagaagcactttctggactgtggaagtatcatggccgtgaggattgtgagagacaaaatgacaggcatcggcaaagggtttggctatgtgctctttgagaatacagattctgttcatcttgctctgaaattaaataattctgaactcatggggagaaaactcagagtcatgcgttctgttaataaagaaaaatttaaacaacaaaattcaaatccacgattgaagaatgtcagtaaacctaagcagggacttaattttacttccaaaactgcagaaggacatcctaaaagcttatttattggagaaaaagctgttctccttaaaacgaagaagaaaggacagaagaaaagtggacgccctaagaaacagagaaaacagaaataacaaccaggaactgctttttcttttcctgctgagtactgctaataaaagtgctattatctgctgatagcatcgtctgctattcatgtgttgagttttatacttctttatggatggtgtatgtgaaatgtggagacttccacattctcagtttattcacattgtgatactacctttgaaggtttttttgtttttgttttgttttttgagatggagtttggctgttgtctcccaggctggagtgcagtggcgtgatcttggctcactgcaacctctgccttctgggttcaagcgcttctcctgcctcagcctcccaagtagctgggattacaggcgcctgccaccacgcctggctaattttttgtatttttagtagagacggggtttcaccatgttggccaggctggtctcgaactcctgacctcaggtgatccacctgccttggcctctcaaagtgctgggattacaggcgtgagtcactgcacccaagcctcctttctcttttgcctattaaacctctgctcttaacctta

SEQ ID NO: 4429 - DNA, 1488 bp, Homo sapiens
  source 1..1488: mol_type = genomic DNA
agctgcagtctgggagtctttggagtaagaatggccttggaagggatgagcaaacggaagagaaagagaagtgtccaggagggagagaatcctgacgacggcgttcgcgggagtccgccggaagactacaggcttggacaggtcgccagtagcttatttcgcggcgaacaccattccagaggtggcaccggtcggctggcgtccctcttcagttctctggagccccagattcaacccgtgtacgtgcctgtgcctaaacaaaccatcaaaaaaacgaaacggaatgaggaggaagaaagtacatcccagattgaaagaccactttcgcaagaacctgccaaaaaagtgaaagcgaagaagaaacacactaacgcagaaaaaaagttggcagacagttctcctttcagattgatgctcagaccttgcttatccatatccagcaatactttatattgtatttaccgtttcacaatttacttttgggaaagcgctctagcgagtgctgatttagaagaagaaattcaccagaaacaagggcagaaaaggaaaaattctcaacctggtgttaaagtagcagatagaaaaatacttgatgacacagaagacacagttgtcagtcaaagaaagaaaattcaaatcaaccaagaagaagagagattaaagaatgagagaactgtgtttgttgggaatttgcctgttacatgtaataagaagaagctgaagtcgttttttaaagagtatggacaaatagaatctgtacgatttcgttctctgattccagcagagggaacgctatccaaaaagttggcagcaataaaacgtaaaattcatcctgatcagaaaaatattaatgcctatgttgtgtttaaggaggagagtgctgccacgcaagcattgaaaagaaatggggcccagattgcagatggatttcgtattagagttgatctcgcatctgagacctcatctagagacaagagatcggtttttgtggggaatctcccttataaagttgaagaatctgccattgagaagcactttctggactgtggaagtatcatggccgtgaggattgtgagagacaaaatgacaggcatcggcaaagggtttggctatgtgctctttgagaatacagattctgttcatcttgctctgaaattaaataattctgaactcatggggagaaaactcagagtcatgcgttctgttaataaagaaaaatttaaacaacaaaattcaaatccacgattgaagaatgtcagtaaacctaagcagggacttaattttacttccaaaactgcagaaggacatcctaaaagcttatttattggagaaaaagctgttctccttaaaacgaagaagaaaggacagaagaaaagtggacgccctaagaaacagagaaaacagaaataacaaccaggaactgctttttcttttcctgctgagtactgctaataaaagtgctattatctgctgatagcatcgtctgct

SEQ ID NO: 4430 - DNA, 667 bp, Homo sapiens
  source 1..667: mol_type = genomic DNA
gcagctgcagtctgggagtctttggagtaagaatggccttggaagggatgagcaaacggaagagaaagagaagtgtccaggagggagagaatcctgacgacggcgttcgcgggagtccgccggaagactacaggcttggacaggtcgccagtagcttatttcgcggcgaacaccattccagaggtggcaccggtcggctggcgtccctcttcagttctctggagccccagattcaacccgtgtacgtgcctgtgcctaaacaaaccatcaaaaaaacgaaacggaatgaggaggaagaaagtacatcccagattgaaagaccactttcgcaagaacctgccaaaaaagtgaaagcgaagaagaaacacactaacgcagaaaaaaagttggcagacagttctcctttcagattgatgctcagaccttgcttatccatatccagcaatactttatattgtatttaccgtttcacaatttacttttgggaaagcgctctagcgagtgctgatttagaagaagaaattcaccagaaacaagggcagaaaaggaaaaattctcaacctggtgttaaagtagcagatagaaaaatacttgatgacacagaagacacagttgtcagtcaaagaaagaaaattcaaatcaaccaagaagaagagagattaaagaa

SEQ ID NO: 4431 - DNA, 1852 bp, Homo sapiens
  source 1..1852: mol_type = genomic DNA
agctgcagtctgggagtctttggagtaagaatggccttggaagggatgagcaaacggaagagaaagagaagtgtccaggagggagagaatcctgacgacggcgttcgcgggagtccgccggaagactacaggcttggacaggtcgccagtagcttatttcgcggcgaacaccattccagaggtggcaccggtcggctggcgtccctcttcagttctctggagccccagattcaacccgtgtacgtgcctgtgcctaaacaaaccatcaaaaaaacgaaacggaatgaggaggaagaaagtacatcccagattgaaagaccactttcgcaagaacctgccaaaaaagtgaaagcgaagaagaaacacactaacgcagaaaaaaagttggcagacagggaaagcgctctagcgagtgctgatttagaagaagaaattcaccagaaacaagggcagaaaaggaaaaattctcaacctggtgttaaagtagcagatagaaaaatacttgatgacacagaagacacagttgtcagtcaaagaaagaaaattcaaatcaaccaagaagaagagagattaaagaatgagagaactgtgtttgttgggaatttgcctgttacatgtaataagaagaagctgaagtcgttttttaaagagtatggacaaatagaatctgtacgatttcgttctctgattccagcagagggaacgctatccaaaaagttggcagcaataaaacgtaaaattcatcctgatcagaaaaatattaatgcctatgttgtgtttaaggaggagagtgctgccacgcaagcattgaaaagaaatggggcccagattgcagatggatttcgtattagagttgatctcgcatctgagacctcatctagagacaagagatcggtttttgtggggaatctcccttataaagttgaagaatctgccattgagaagcactttctggactgtggaagtatcatggccgtgaggattgtgagagacaaaatgacaggcatcggcaaagggtttggctatgtgctctttgagaatacagattctgttcatcttgctctgaaattaaataattctgaactcatggggagaaaactcagagtcatgcgttctgttaataaagaaaaatttaaacaacaaaattcaaatccacgattgaagaatgtcagtaaacctaagcagggacttaattttacttccaaaactgcagaaggacatcctaaaagcttatttattggagaaaaagctgttctccttaaaacgaagaagaaaggacagaagaaaagtggacgccctaagaaacagagaaaacagaaataacaaccaggaactgctttttcttttcctgctgagtactgctaataaaagtgctattatctgctgatagcatcgtctgctattcatgtgttgagttttatacttctttatggatggtgtatgtgaaatgtggagacttccacattctcagtttattcacattgtgatactacctttgaaggtttttttgtttttgttttgttttttgagatggagtttggctgttgtctcccaggctggagtgcagtggcgtgatcttggctcactgcaacctctgccttctgggttcaagcgcttctcctgcctcagcctcccaagtagctgggattacaggcgcctgccaccacgcctggctaattttttgtatttttagtagagacggggtttcaccatgttggccaggctggtctcgaactcctgacctcaggtgatccacctgccttggcctctcaaagtgctgggattacaggcgtgagtcactgcacccaagcctcctttctcttttgcctattaaacctctgctcttaacctt

SEQ ID NO: 4432 - DNA, 2382 bp, Homo sapiens
  source 1..2382: mol_type = genomic DNA
gcagcgccggtcgggagcgcagcgcggcgcacgtcggcgcgcacggcgggacgggcgccggagtggtcgggcctggcggctggacgggcgcccctcgctgccccgcgcgctccccgccgccccccatgagcgcagccccgcgcggcccgggtccgtaggcggcggggcgccccccatgctgctgcagcccgcgccgtgcgccccgagcgcgggcttcccgcggcccctggccgcccccggcgccatgcacggctcgcagaaggacaccacgttcaccaagatcttcgtgggcggcctgccgtaccacactaccgacgcctcgctcaggaagtacttcgagggcttcggcgacatcgaggaggccgtggtcatcaccgaccgccagacgggcaagtcccgcggctacggcttcgtgaccatggccgaccgggcggcagctgagagggcttgcaaagacccgaaccccatcatcgacggccgcaaggccaacgtgaacctggcatatctgggcgccaagccgcggagcctccagacgggctttgccattggggtgcagcagctgcaccccaccttgatccagcggacttacgggctgaccccgcactacatctacccaccagccatcgtgcagcccagcgtggtgatcccagccgcccctgtcccgtcgctgtcctcgccctacattgagtacacgccggccagcccggcctacgcccagtacccaccggccacctatgaccagtacccatacgccgcctcgcctgccacggctgccagcttcgtgggctacagctaccctgccgccgtgccccaggccctctcagccgcagcacccgcgggcaccactttcgtgcagtaccaggcgccgcagctgcagcctgacaggatgcagtgaggggcgttcctgccccgaggactgtggcattgtcaccttcacagcagacagagctgccaggccatgatgggctggcgacagcccggctgagcttcagtgaggtgccaccagcacccgtgcctccgaagaccgctcgggcattccgcctgcgccctgggacagcggagagacggcttctctttaatctaggtcccattgtgtcttgagggaggactttaagaatgactgagaactatttaaagacgcaatcccaggttccttgcacaccatggcagcctctccttgcaccttctcctgcctctccacactccaggttccctcaggcttgtgtccccactgctgcatcgtggcggggtgtcacagaccctctgcagcccctggctgccctggactgtgcagagatgcctgactccagggaaacctgaaagcaagaagttaatggactgtttattgtaacttgatcctcccgagctgtgagcgcagtctgaggtgtgaggacacggcctcctgttggagtcccattttctccatcagggcacgtgggcggcttcctcaagcccggaggagctcccaggcgcacaggggccgccggtaacaggggccgccggccaaaggcccctttccagtcatagcactgaagttgcaacttttttcttgtaattgttttgctactaagataatttcagaagttcagtctattttttcagcggatactgccgccaccaagaatccaaaacctatttttgacttggagagacttgcttttgttggttccgcccgtggagacgacgatagtgtttctgtataataaagtgtctgccggctcgcgggccaggatcctctcggtgggatgggcaccacagacaggaggcccctcaggcccgtgcgggccactgtctgctgccgcctgccggggtggcagagtgagttgtctcaggaccccgtcactgcgacgttgacactcctctcccttcccttcctccccaactccccaaacactgtggaaggggagaaggaagtgatccacagcattcaggccacttggggtctagaccatggtggtgccagcctggggggggcagtggccctcagctctgcccgctggagcggttgagtgcagaagggtgcgcctcttccctctacccccgcaccacctgctgtgtgccagcctgagacggttcctgcctgtcttgggggttggtggagggtggaggcagttctgccagccgtggcagggctgctatggggcatccagggctgtgggggtctggaggaggggacatgaggtgagaggtatcctggccgagggcggggggcagcggggggtctccctccggacctacctcagggagctgagcgtgcaggcgctccagggcaggcctgggacagagtcaaggctcagagaataaaggtagctaatctcatcataatatttttattagaatgttctgatgataaaaataaaacttgttttctttaaagaaaaa

SEQ ID NO: 4433 - DNA, 686 bp, Homo sapiens
  source 1..686: mol_type = genomic DNA
gcgcggcgcacgtcggcgcgcacggcgggacgggcgccggagtggtcgggcctggcggctggacgggcgcccctcgctgccccgcgcgctccccgccgccccccatgagcgcagccccgcgcggcccgggtccgtaggcggcggggcgccccccatgctgctgcagcccgcgccgtgcgccccgagcgcgggcttcccgcggcccctggccgcccccggcgccatgcacggctcgcagaaggacaccacgttcaccaagatcttcgtgggcggcctgccgtaccacactaccgacgcctcgctcaggaagtacttcgagggcttcggcgacatcgaggaggccgtggtcatcaccgaccgccagacgggcaagtcccgcggctacggcttcgtgaccatggccgaccgggcggcagctgagagggcttgcaaagacccgaaccccatcatcgacggccgcaaggccaacgtgaacctggcatatctgggcgccaagccgcggagcctccagacgggctgaccccgcactacatctacccaccagccatcgtgcagcccagcgtggtgatcccagccgcccctgtcccgtcgctgtcctcgccctacattgagtacacgccggccagcccggcctacgcccagtacccaccggccacctatgaccagtacccatacgccgcctcgcc

SEQ ID NO: 4434 - DNA, 760 bp, Homo sapiens
  source 1..760: mol_type = genomic DNA
ataaacatcagcttaagtaaaaacgtcttgaagacactttcctgcttaccttccaagcatagcgtcgcaaactccttctcagaggaaagtctcggccctcactggtgggcaagtccaggcggccccccaagctcccttcggggttcatttttgccctatccccgcaggggattatttttgtccttgaaggccacatttcccaggccttgaactttgacgggaggagctggaatccaggaggcatctttgtgggagagccccaggtgaccatggccgaccgggcggcagctgagagggcttgcaaagacccgaaccccatcatcgacggccgcaaggccaacgtgaacctggcatatctgggcgccaagccgcggagcctccagacgggctttgccattggggtgcagcagctgcaccccaccttgatccagcggacttacgggctgaccccgcactacatctacccaccagccatcgtgcagcccagcgtggtgatcccagccgcccctgtcccgtcgctgtcctcgccctacattgagtacacgccggccagcccggcctacgcccagtacccaccggccacctatgaccagtacccatacgccgcctcgcctgccacggctgccagcttcgtgggctacagctaccctgccgccgtgccccaggccctctcagccgcagcacccgcgggcaccactttcgtgcagtaccaggcgccgcagctgcagcctgacaggatgcagtgaggggcgttcctgcc

SEQ ID NO: 4435 - DNA, 2488 bp, Homo sapiens
  source 1..2488: mol_type = genomic DNA
ggccggaacaggcgtttagagaaaatggcagacgatattgatattgaagcaatgcttgaggctccttacaagaaggatgagaacaagttgagcagtgccaacggccatgaagaacgtagcaaaaagaggaaaaaaagcaagagcagaagtcgtagtcatgaacgaaagagaagcaaaagtaaggaacggaagcgaagtagagacagagaaaggaaaaagagcaaaagccgtgaaagaaagcgaagtagaagcaaagagaggcgacggagccgctcaagaagtcgagatcgaagatttagaggccgctacagaagtccttactccggaccaaaatttaacagtgccatccgaggaaagattgggttgcctcatagcatcaaattaagcagacgacgttcccgaagcaaaagtccattcagaaaagacaagagccctgtgagagaacctattgataatttaactcctgaggaaagagatgcaaggacagtcttctgtatgcagctggcggcaagaattcgaccaagggatttggaagagtttttctctacagtaggaaaggttcgagatgtgaggatgatttctgacagaaattcaagacgttccaaaggaattgcttatgtggagttcgtcgatgttagctcagtgcctctagcaataggattaactggccaacgagttttaggcgtgccaatcatagtacaggcatcacaggcagaaaaaaacagagctgcagcaatggcaaacaatttacaaaagggaagtgctggacctatgaggctttatgtgggctcattacacttcaacataactgaagatatgcttcgtgggatctttgagccttttggaagaattgaaagtatccagctgatgatggacagtgaaactggtcgatccaagggatatggatttattacattttctgactcagaatgtgccaaaaaggctttggaacaacttaatggatttgaactagcaggaagaccaatgaaagttggtcatgttactgaacgtactgatgcttcgagtgctagttcatttttggacagtgatgaactggaaaggactggaattgatttgggaacaactggtcgtcttcagttaatggcaagacttgcagagggtacaggtttgcagattccgccagcagcacagcaagctctacagatgagtggctctttggcatttggtgctgtggcagaattctcttttgttatagatttgcaaacaagactttcccagcagactgaagcttcagctttagctgcagctgcctctgttcagccacttgcaacacaatgtttccaactctctaacatgtttaaccctcaaacagaagaagaagttggatgggataccgagattaaggatgatgtgattgaagaatgtaataaacatggaggagttattcatatttatgttgacaaaaattcagctcagggcaatgtgtatgtgaagtgcccatcaattgctgcagctattgctgctgtcaatgcattgcatggcaggtggtttgctggtaaaatgataacagcagcatatgtacctcttccaacttaccacaacctgtttcctgattctatgacagcaacacagctactggttccaagtagacgatgaaggaagatatagtcccttatgtatatagctttttttctttcttgagaattcatcttgagttatcttttatttagataaaaataaagaggcaaggatctactgtcatttgtatgcaatttcctgttaccttgaaaaaataaaaatgttaacaggaatgcagtgtgctcattctccctaaatagtaaatcccactgtatacaaaactgttctcttgttctgccttttaaaatgttcatgtagaaaattaatgaactataggaatagctctaggagaacaaatgtgctttctgtaaaaaggcagaccagggatgtaatgtttttaatgtttcagaagcctaactttttacacagtggttacatttcacatttcactaatgttgatatttggctgatggttgagcagtttctgaaatacacatttagtgtatggaaatacaagacagctaaagggctgtttggttagcatctcatcttgcattctgatcaattggcaagaaagggagatttcaaaattatatttcttgatggtatcttttcaattaatgtatctgtaaaagtttctttgtaaatactatgtgttctggtgtgtcttaaaattccaaacaaaatgatccctgcatttcctgaagatgtttaaacgtgagagtctggtaggcaaagcagtctgagaaagaaataggaaatgcagaaataggttttgtctggttgcatataatctttgctctttttaagctctgtgagctctgaaatatatttttgggttacttcagtgtgtttgacaagacagcttgatatttctatcaaacaaatgactttcatattgcaacaatctttgtaagaaccactcaaataaaagtctcttaaaaaggcc

SEQ ID NO: 4436 - DNA, 2147 bp, Homo sapiens
  source 1..2147: mol_type = genomic DNA
gtgctggtgaatgtgagtacagggaagcagcggccgccatttcagggagcttgtcgacgctgtcgcaggggtggatcctgagctgccgaagccgccgtcctgctctcccgcgtgggcttctctaattccattgttttttttagattctctcgggcctagccgtccttggaacccgatattcgggctgggcggttccgcggcctgggcctaggggcttaacagtagcaacagaagcggcggcggcggcagcagcagcagcagcagcagcaatctcttcccgaacacgagcaccacaggcgcccgaaggccggaacaggcgtttagagaaaatggcagacgatattgatattgaagcaatgcttgaggctccttacaagaaggatgagaacaagttgagcagtgccaacggccatgaagaacgtagcaaaaaacaaactttctgcctccttggaaagctctacatctccttgtgattggagtgtgggtttcaagattccagaaggaggaaaaaaagcaagagcagaagtcgtagtcatgaacgaaagagaagcaaaagtaaggaacggaagcgaagtagagacagagaaaggaaaaagagcaaaagccgtgaaagaaagcgaagtagaagcaaagagaggcgacggagccgctcaagaagtcgagatcgaagatttagaggccgctacagaagtccttactccggaccaaaatttaacagtgccatccgaggaaagattgggttgcctcatagcatcaaattaagcagacgacgttcccgaagcaaaagtccattcagaaaagacaagagccctgtgagagaacctattgataatttaactcctgaggaaagagatgcaaggacagtcttctgtatgcagctggcggcaagaattcgaccaagggatttggaagagtttttctctacagtaggaaaggttcgagatgtgaggatgatttctgacagaaattcaagacgttccaaaggaattgcttatgtggagttcgtcgatgttagctcagtgcctctagcaataggattaactggccaacgagttttaggcgtgccaatcatagtacaggcatcacaggcagaaaaaaacagagctgcagcaatggcaaacaatttacaaaagggaagtgctggacctatgaggctttatgtgggctcattacacttcaacataactgaagatatgcttcgtgggatctttgagccttttggaagaattgaaagtatccagctgatgatggacagtgaaactggtcgatccaagggatatggatttattacattttctgactcagaatgtgccaaaaaggctttggaacaacttaatggatttgaactagcaggaagaccaatgaaagttggtcatgttactgaacgtactgatgcttcgagtgctagttcatttttggacagtgatgaactggaaaggactggaattgatttgggaacaactggtcgtcttcagttaatggcaagacttgcagagggtacaggtttgcagattccgccagcagcacagcaagctctacagatgagtggctctttggcatttggtgctgtggcagaattctcttttgttatagatttgcaaacaagactttcccagcagactgaagcttcagctttagctgcagctgcctctgttcagccacttgcaacacaatgtttccaactctctaacatgtttaaccctcaaacagaagaagaagttggatgggataccgagattaaggatgatgtgattgaagaatgtaataaacatggaggagttattcatatttatgttgacaaaaattcagctcagggcaatgtgtatgtgaagtgcccatcaattgctgcagctattgctgctgtcaatgcattgcatggcaggtggtttgctggtaaaatgataacagcagcatatgtacctcttccaacttaccacaacctgtttcctgattctatgacagcaacacagctactggttccaagtagacgatgaaggaagatatagtcccttatgtatatagctttttttctttcttgagaattcatcttgagttatcttttatttagataaaaataaagaggcaaggatctactgtcatttgtatgcaatttcctgttaccttgaaaaaataaaaatgttaacagg

SEQ ID NO: 4437 - DNA, 2831 bp, Homo sapiens
  source 1..2831: mol_type = genomic DNA
gcgagagcccgtgctgagggctctgtgaggccccgtgtgtttgtgtgtgtgtatgtgtgctggtgaatgtgagtacagggaagcagcggccgccatttcagggagcttgtcgacgctgtcgcaggggtggatcctgagctgccgaagccgccgtcctgctctcccgcgtgggcttctctaattccattgttttttttagattctctcgggcctagccgtccttggaacccgatattcgggctgggcggttccgcggcctgggcctaggggcttaacagtagcaacagaagcggcggcggcggcagcagcagcagcagcagcagcaatctcttcccgaacacgagcaccacaggcgcccgaaggccggaacaggcgtttagagaaaatggcagacgatattgatattgaagcaatgcttgaggctccttacaagaaggatgagaacaagttgagcagtgccaacggccatgaagaacgtagcaaaaagaggaaaaaaagcaagagcagaagtcgtagtcatgaacgaaagagaagcaaaagtaaggaacggaagcgaagtagagacagagaaaggaaaaagagcaaaagccgtgaaagaaagcgaagtagaagcaaagagaggcgacggagccgctcaagaagtcgagatcgaagatttagaggccgctacagaagtccttactccggaccaaaatttaacagtgccatccgaggaaagattgggttgcctcatagcatcaaattaagcagacgacgttcccgaagcaaaagtccattcagaaaagacaagagccctgtgagagaacctattgataatttaactcctgaggaaagagatgcaaggacagtcttctgtatgcagctggcggcaagaattcgaccaagggatttggaagagtttttctctacagtaggaaaggttcgagatgtgaggatgatttctgacagaaattcaagacgttccaaaggaattgcttatgtggagttcgtcgatgttagctcagtgcctctagcaataggattaactggccaacgagttttaggcgtgccaatcatagtacaggcatcacaggcagaaaaaaacagagctgcagcaatggcaaacaatttacaaaagggaagtgctggacctatgaggctttatgtgggctcattacacttcaacataactgaagatatgcttcgtgggatctttgagccttttggaagaattgaaagtatccagctgatgatggacagtgaaactggtcgatccaagggatatggatttattacattttctgactcagaatgtgccaaaaaggctttggaacaacttaatggatttgaactagcaggaagaccaatgaaagttggtcatgttactgaacgtactgatgcttcgagtgctagttcatttttggacagtgatgaactggaaaggactggaattgatttgggaacaactggtcgtcttcagttaatggcaagacttgcagagggtacaggtttgcagattccgccagcagcacagcaagctctacagatgagtggctctttggcatttggtgctgtggcagatttgcaaacaagactttcccagcagactgaagcttcagctttagctgcagctgcctctgttcagccacttgcaacacaatgtttccaactctctaacatgtttaaccctcaaacagaagaagaagttggatgggataccgagattaaggatgatgtgattgaagaatgtaataaacatggaggagttattcatatttatgttgacaaaaattcagctcagggcaatgtgtatgtgaagtgcccatcaattgctgcagctattgctgctgtcaatgcattgcatggcaggtggtttgctggtaaaatgataacagcagcatatgtacctcttccaacttaccacaacctgtttcctgattctatgacagcaacacagctactggttccaagtagacgatgaaggaagatatagtcccttatgtatatagctttttttctttcttgagaattcatcttgagttatcttttatttagataaaaataaagaggcaaggatctactgtcatttgtatgcaatttcctgttaccttgaaaaaataaaaatgttaacaggaatgcagtgtgctcattctccctaaatagtaaatcccactgtatacaaaactgttctcttgttctgccttttaaaatgttcatgtagaaaattaatgaactataggaatagctctaggagaacaaatgtgctttctgtaaaaaggcagaccagggatgtaatgtttttaatgtttcagaagcctaactttttacacagtggttacatttcacatttcactaatgttgatatttggctgatggttgagcagtttctgaaatacacatttagtgtatggaaatacaagacagctaaagggctgtttggttagcatctcatcttgcattctgatcaattggcaagaaagggagatttcaaaattatatttcttgatggtatcttttcaattaatgtatctgtaaaagtttctttgtaaatactatgtgttctggtgtgtcttaaaattccaaacaaaatgatccctgcatttcctgaagatgtttaaacgtgagagtctggtaggcaaagcagtctgagaaagaaataggaaatgcagaaataggttttgtctggttgcatataatctttgctctttttaagctctgtgagctctgaaatatatttttgggttacttcagtgtgtttgacaagacagcttgatatttctatcaaacaaatgactttcatattgcaacaatctttgtaagaaccactcaaataaaagtctcttaaaaaggcc

SEQ ID NO: 4438 - DNA, 1008 bp, Homo sapiens
  source 1..1008: mol_type = genomic DNA
aagtccattcagaaaagacaagagccctgtgagagaacctattgataatttaactcctgaggaaagagatgcaaggacagtcttctgtatgcagctggcggcaagaattcgaccaagggatttggaagagtttttctctacagtaggaaaggttcgagatgtgaggatgatttctgacagaaattcaagacgttccaaaggaattgcttatgtggagttcgtcgatgttagctcagtgcctctagcaataggattaactggccaacgagttttaggcgtgccaatcatagtacaggcatcacaggcagaaaaaaacagagctgcagcaatggcaaacaatttacaaaagggaagtgctggacctatgaggctttatgtgggctcattacacttcaacataactgaagatatgcttcgtgggatctttgagccttttggaagattttctgactcagaatgtgccaaaaaggctttggaacaacttaatggatttgaactagcaggaagaccaatgaaagttggtcatgttactgaacgtactgatgcttcgagtgctagttcatttttggacagtgatgaactggaaaggactggaattgatttgggaacaactggtcgtcttcagttaatggcaagacttgcagagggtacaggtttgcagattccgccagcagcacagcaagctctacagatgagtggctctttggcatttggtgctgtggcagaattctcttttgttatagatttgcaaacaagactttcccagcagactgaagcttcagctttagctgcagctgcctctgttcagccacttgcaacacaatgtttccaactctctaacatgtttaaccctcaaacagaagaagaagttggatgggataccgagattaaggatgatgtgattgaagaatgtaataaacatggaggagttattcatatttatgttgacaaaaattcagctcagggcaatgtgtatgtgaagtgcccatcaattgctgcagctattgc

SEQ ID NO: 4439 - DNA, 1026 bp, Homo sapiens
  source 1..1026: mol_type = genomic DNA
gtgtgctggtgaatgtgagtacagggaagcagcggccgccatttcagggagcttgtcgacgctgtcgcaggggtggatcctgagctgccgaagccgccgtcctgctctcccgcgtgggcttctctaattccattgttttttttagattctctcgggcctagccgtccttggaacccgatattcgggctgggcggttccgcggcctgggcctaggggcttaacagtagcaacagaagcggcggcggcggcagcagcagcagcagcagcagcaatctcttcccgaacacgagcaccacaggcgcccgaaggccggaacaggcgtttagagaaaatggcagacgatattgatattgaagcaatgcttgaggctccttacaagaaggatgagaacaagttgagcagtgccaacggccatgaagaacgtagcaaaaagaggaaaaaaagcaagagcagaagtcgtagtcatgaacgaaagagaagcaaaagtaaggaacggaagcgaagtagagacagagaaaggaaaaagagcaaaagccgtgaaagaaagcgaagtagaagcaaagagaggcgacggagccgctcaagaagtcgagatcgaagatttagaggccgctacagaagtccttactccggaccaaaatttaacagtgccatccgaggaaagattgggttgcctcatagcatcaaattaagacgacgttcccgaagcaaaagtccattcagaaaagacaagagccctgtgagagaacctattgataatttaactcctgaggaaagagatgcaaggacagtcttctgtatgcagctggcggcaagaattcgaccaagggatttggaagagtttttctctacagtaggaaaggttcgagatgtgaggatgatttctgacagaaattcaagacgttccaaaggaattgcttatgtggagttcgtcgatgttagctcagtgcctctagcaataggattaactggccaacgagttttaggcgtgccaatcatagtacaggcatcacaggcagaaaaaaa

SEQ ID NO: 4440 - DNA, 2109 bp, Homo sapiens
  source 1..2109: mol_type = genomic DNA
cctagccgtccttggaacccgatattcgggctgggcggttccgcggcctgggcctaggggcttaacagtagcaacagaagcggcggcggcggcagcagcagcagcagcagcagcaatctcttcccgaacacgagcaccacaggcgcccgaaggccggaacaggcgtttagagaaaatggcagacgatattgatattgaagcaatgcttgaggctccttacaagaaggatgagaacaagttgagcagtgccaacggccatgaagaacgtagcaaaaagaggaaaaaaagcaagagcagaagtcgtagtcatgaacgaaagagaagcaaaagtaaggaacggaagcgaagtagagacagagaaaggaaaaagagcaaaagccgtgaaagaaagcgaagtagaagcaaagagaggcgacggagccgctcaagaagtcgagatcgaagatttagaggccgctacagaagtccttacagacgacgttcccgaagcaaaagtccattcagaaaagacaagagccctgtgagagaacctattgataatttaactcctgaggaaagagatgcaaggacagtcttctgtatgcagctggcggcaagaattcgaccaagggatttggaagagtttttctctacagtaggaaaggttcgagatgtgaggatgatttctgacagaaattcaagacgttccaaaggaattgcttatgtggagttcgtcgatgttagctcagtgcctctagcaataggattaactggccaacgagttttaggcgtgccaatcatagtacaggcatcacaggcagaaaaaaacagagctgcagcaatggcaaacaatttacaaaagggaagtgctggacctatgaggctttatgtgggctcattacacttcaacataactgaagatatgcttcgtgggatctttgagccttttggaagaattgaaagtatccagctgatgatggacagtgaaactggtcgatccaagggatatggatttattacattttctgactcagaatgtgccaaaaaggctttggaacaacttaatggatttgaactagcaggaagaccaatgaaagttggtcatgttactgaacgtactgatgcttcgagtgctagttcatttttggacagtgatgaactggaaaggactggaattgatttgggaacaactggtcgtcttcagttaatggcaagacttgcagagggtacaggtttgcagattccgccagcagcacagcaagctctacagatgagtggctctttggcatttggtgctgtggcagaattctcttttgttatagatttgcaaacaagactttcccagcagactgaagcttcagctttagctgcagctgcctctgttcagccacttgcaacacaatgtttccaactctctaacatgtttaaccctcaaacagaagaagaagttggatgggataccgagattaaggatgatgtgattgaagaatgtaataaacatggaggagttattcatatttatgttgacaaaaattcagctcagggcaatgtgtatgtgaagtgcccatcaattgctgcagctattgctgctgtcaatgcattgcatggcaggtggtttgctggtaaaatgataacagcagcatatgtacctcttccaacttaccacaacctgtttcctgattctatgacagcaacacagctactggttccaagtagacgatgaaggaagatatagtcccttatgtatatagctttttttctttcttgagaattcatcttgagttatcttttatttagataaaaataaagaggcaaggatctactgtcatttgtatgcaatttcctgttaccttgaaaaaataaaaatgttaacaggaatgcagtgtgctcattctccctaaatagtaaatcccactgtatacaaaactgttctcttgttctgccttttaaaatgttcatgtagaaaattaatgaactataggaatagctctaggagaacaaatgtgctttctgtaaaaaggcagaccagggatgtaatgtttttaatgtttcagaagcctaactttttacacagtggttacatttcacatttcactaatgttgatatttggctgatggttgagcagtttc

SEQ ID NO: 4441 - DNA, 2792 bp, Homo sapiens
  source 1..2792: mol_type = genomic DNA
gccatttcagggagcttgtcgacgctgtcgcaggggtggatcctgagctgccgaagccgccgtcctgctctcccgcgtgggcttctctaattccattgttttttttagattctctcgggcctagccgtccttggaacccgatattcgggctgggcggttccgcggcctgggcctaggggcttaacagtagcaacagaagcggcggcggcggcagcagcagcagcagcagcagcaatctcttcccgaacacgagcaccacaggcgcccgaaggccggaacaggcgtttagagaaaatggcagacgatattgatattgaagcaatgcttgaggctccttacaagaaggatgagaacaagttgagcagtgccaacggccatgaagaacgtagcaaaaagaggaaaaaaagcaagagcagaagtcgtagtcatgaacgaaagagaagcaaaagtaaggaacggaagcgaagtagagacagagaaaggaaaaagagcaaaagccgtgaaagaaagcgaagtagaagcaaagagaggcgacggagccgctcaagaagtcgagatcgaagatttagaggccgctacagaagtccttactccggaccaaaatttaacagtgccatccgaggaaagattgggttgcctcatagcatcaaattaagcagacgacgttcccgaagcaaaagtccattcagaaaagacaagagccctgtgagagaacctattgataatttaactcctgaggaaagagatgcaaggacagtcttctgtatgcagctggcggcaagaattcgaccaagggatttggaagagtttttctctacagtaggaaaggttcgagatgtgaggatgatttctgacagaaattcaagacgttccaaaggaattgcttatgtggagttcgtcgatgttagctcagtgcctctagcaataggattaactggccaacgagttttaggcgtgccaatcatagtacaggcatcacaggcagaaaaaaacagagctgcagcaatggcaaacaatttacaaaagggaagtgctggacctatgaggctttatgtgggctcattacacttcaacataactgaagatatgcttcgtgggatctttgagccttttggaagaattgaaagtatccagctgatgatggacagtgaaactggtcgatccaagggatatggatttattacattttctgactcagaatgtgccaaaaaggctttggaacaacttaatggatttgaactagcaggaagaccaatgaaagttggtcatgttactgaacgtactgatgcttcgagtgctagttcatttttggacagtgatgaactggaaaggactggaattgatttgggaacaactggtcgtcttcagttaatggcaagacttgcagagggtacaggtttgcagattccgccagcagcacagcaagctctacagatgagtggctctttggcatttggtgctgtggcagatttgcaaacaagactttcccagcagactgaagctttgtttgttattatgttttggaatgaaatttggtcagataatatgattacgcttcagctttagctgcagctgcctctgttcagccacttgcaacacaatgtttccaactctctaacatgtttaaccctcaaacagaagaagaagttggatgggataccgagattaaggatgatgtgattgaagaatgtaataaacatggaggagttattcatatttatgttgacaaaaattcagctcagggcaatgtgtatgtgaagtgcccatcaattgctgcagctattgctgctgtcaatgcattgcatggcaggtggtttgctggtaaaatgataacagcagcatatgtacctcttccaacttaccacaacctgtttcctgattctatgacagcaacacagctactggttccaagtagacgatgaaggaagatatagtcccttatgtatatagctttttttctttcttgagaattcatcttgagttatcttttatttagataaaaataaagaggcaaggatctactgtcatttgtatgcaatttcctgttaccttgaaaaaataaaaatgttaacaggaatgcagtgtgctcattctccctaaatagtaaatcccactgtatacaaaactgttctcttgttctgccttttaaaatgttcatgtagaaaattaatgaactataggaatagctctaggagaacaaatgtgctttctgtaaaaaggcagaccagggatgtaatgtttttaatgtttcagaagcctaactttttacacagtggttacatttcacatttcactaatgttgatatttggctgatggttgagcagtttctgaaatacacatttagtgtatggaaatacaagacagctaaagggctgtttggttagcatctcatcttgcattctgatcaattggcaagaaagggagatttcaaaattatatttcttgatggtatcttttcaattaatgtatctgtaaaagtttctttgtaaatactatgtgttctggtgtgtcttaaaattccaaacaaaatgatccctgcatttcctgaagatgtttaaacgtgagagtctggtaggcaaagcagtctgagaaagaaataggaaatgcagaaataggttttgtctggttgcatataatctttgctctttttaagctctgtgagctctgaaatatatttttgggttacttcagtgtgtttgacaagacagcttgatatttctatcaaacaaatgactttcatattgcaacaatctttgtaagaaccactcaaataaaagtctcttaaaaaggc

SEQ ID NO: 4442 - DNA, 716 bp, Homo sapiens
  source 1..716: mol_type = genomic DNA
ggcagcgcgggtttttgcccggaaagaggcgctctcgttcgggtctcccagtttctgtttttggagttgacagcagagttttaaatattggatattgaagtcttcattttcgtgtgtttcgtgcgtttagagaaaatggcagacgatattgatattgaagcaatgcttgaggctccttacaagaaggatgagaacaagttgagcagtgccaacggccatgaagaacgtagcaaaaagaggaaaaaaagcaagagcagaagtcgtagtcatgaacgaaagagaagcaaaagtaaggaacggaagcgaagtagagacagagaaaggaaaaagagcaaaagccgtgaaagaaagcgaagtagaagcaaagagaggcgacggagccgctcaagaagtcgagatcgaagatttagaggccgctacagaagtccttactccggaccaaaatttaacagtgccatccgaggaaagattgggttgcctcatagcatcaaattaagcagacgacgttcccgaagcaaaagtccattcagaaaagacaagagccctgtgagagaacctattgataatttaactcctgaggaaagagatgcaaggacagtcttctgtatgcagctggcggcaagaattcgaccaagggatttggaagagtttttctctacagtaggaaaggttcgagatgtgaggatgatttctgacagaaattcaagacgttccaa

SEQ ID NO: 4443 - DNA, 757 bp, Homo sapiens
  source 1..757: mol_type = genomic DNA
aggaggccctgctggtttctgtgcgggtgagactccgagcctttccactgcctttcttgtactgtgttaaatcttctctcactcccttgggcttcgggggtgtcctggtaggtccgcagtctccacacccgtcactgagagccgacctcggtcctcggcattgcgcggctcttgtcaggatggtgaagctgttcatcggaaacctgccccgggaggctacagagcaggagattcgctcactcttcgagcagtatgggaaggtgctggaatgtgacatcattaagaattacggctttgtgcacatagaagacaagacggcagctgaggatgccatacgcaacctgcaccattacaagcttcatggggtgaacatcaacgtggaagccagcaagaataagagcaaaacctcaacaaagttgcatgtgggcaacatcagtcccacctgcaccaataaggagcttcgagccaagtttgaggagtatggtccggtcatcgaatgtgacatcgtgaaagattatgccttcgtacacatggagcgggcagaggatgcagtggaggccatcaggggccttgataacacagagtttcaaggtgaaccaccctctttgggtagagggctgaacacaaggctgtgtgcagaaaatggttggataagtaaaaggagaggtttggtaaagataacagctgttggctggctggtgatgaagaaataagtgtgggtgatggacttcttatgatgtagaatgcatgggactta

SEQ ID NO: 4444 - DNA, 1763 bp, Homo sapiens
  source 1..1763: mol_type = genomic DNA
actgctgcggccgccgccattttagcgttttgtcagaagcgtccgcgccgcgaggaggaggccctgctggtttctgtgcgggtgagactccgagcctttccactgcctttcttgtactgtgttaaatcttctctcactcccttgggcttcgggggtgtcctggtaggtccgcagtctccacacccgtcactgagagccgacctcggtcctcggcattgcgcggctcttgtcaggatggtgaagctgttcatcggaaacctgccccgggaggctacagagcaggagattcgctcactcttcgagcagtatgggaaggtgctggaatgtgacatcattaagaattacggctttgtgcacatagaagacaagacggcagctgaggatgccatacgcaacctgcaccattacaagcttcatggggtgaacatcaacgtggaagccagcaagaataagagcaaaacctcaacaaagttgcatgtgggcaacatcagtcccacctgcaccaataaggagcttcgagccaagtttgaggagtatggtccggtcatcgaatgtgacatcgtgaaagattatgccttcgtacacatggagcgggcagaggatgcagtggaggccatcaggggccttgataacacagagtttcaaggcaaacgaatgcacgtgcagttgtccaccagccggcttaggactgcgcccgggatgggagaccagagcggctgctatcggtgcgggaaagaggggcactggtccaaagagtgtccgatagatcgttcaggccgcgtggcagacttgaccgagcaatataatgagcaatacggagcagtgcgtacgccttacaccatgagctatggggattcattgtattacaacaacgcgtacggagcgctcgatgcctactacaagcgctgccgtgctgcccggtcctatgaggcagtggcagctgcagctgcctccgtgtataattacgcagagcagaccctgtcccagctgccacaagtccagaatacagccatggccagtcacctcacctccacctctctcgatccctacgatagacacctgttgccgacctcaggagctgctgccacagctgctgctgcagcagcagccgctgctgctgttactgcagcttccacttcatattacgggcgggatcggagccccctgcgtcgcgctacagccccagtccccactgttggagagggctacggttacgggcatgagagtgagttgtcccaagcttcagcagccgcgcggaattctctgtacgacatggcccggtatgagcgggagcagtatgccgatcgggcgcggtactcagccttttaaagcttgaggtgggatgtgtgtgggctgaaattccgagctgcggttgtgcatgagaatacacccttcgtggtaccccatctccgggacgttctcggctctgtgcgttcagtccctcaggaaccgtggaccttaatttaccttgctaagttcagaccttctcttcctttcctttcctttcctctcctgcccattttcctgttcttctgtccttcaatacttctgtagcttcccattcatgttctcttctcccagcaggcctcattgtgtgcagaaactgtggtgggggctgtgctgtctcctccctgcctcctgcctcctgcggctgttggatttgggaatgaccttggtgagagtctcactgctccagggtctctttttggtccaaaggctagacctatagagttggatcactttttttctttccggtgaaataa

SEQ ID NO: 4445 - DNA, 2321 bp, Homo sapiens
  source 1..2321: mol_type = genomic DNA
accttgctttttttcgcccaccctgtcccgcgcccgacatggctgctcttggagcctcgagatttccactgggataaccccctttcccttatatctgacagttacattctcgtttcgggaatttctcgggccgtgagacatcgtctggttaatgaatctgaagctcttttccgcggccgcgcatttcagtgttcggcaggagctaggacggtgccccgagagaggcgttcaccactccagtatttcctttatctcccactcctcgctgtctgatccgagtcgcgcgttcattacttccaaaggaaactcaaatgtagctattacaaggcccattttcccggaaatgatggctgctttggttcctacgtgaggaaaagcctgttgataatttcaggcaggcagtcagcaagcctagtagacttttgttttctgttgtcctcctagtggatagaaaagcctagtacccccatttcttcatatgctgtctttcatgcccatttctgttggaaggtatcggttcttaccaaaccctttgtctactaaggacctccctattgcagacgtcttcttattcttacaggttcatggcggctactatagcaggccttagttcactcccacttccatttgattattgtgtggaggtgtgtgtgcaggcgtgtgagagagaaaactggaaatatacattagagtgaaagtcgttgtcttttgtgaacggatgtgggcctgaggtcttttgtcagatgtcttgtttttctctcccaggctcttgtcaggatggtgaagctgttcatcggaaacctgccccgggaggctacagagcaggagattcgctcactcttcgagcagtatgggaaggtgctggaatgtgacatcattaagaattacggctttgtgcacatagaagacaagacggcagctgaggatgccatacgcaacctgcaccattacaagcttcatggggtgaacatcaacgtggaagccagcaagaataagagcaaaacctcaacaaagttgcatgtgggcaacatcagtcccacctgcaccaataaggagcttcgagccaagtttgaggagtatggtccggtcatcgaatgtgacatcgtgaaagattatgccttcgtacacatggagcgggcagaggatgcagtggaggccatcaggggccttgataacacagagtttcaaggcaaacgaatgcacgtgcagttgtccaccagccggcttaggactgcgcccgggatgggagaccagagcggctgctatcggtgcgggaaagaggggcactggtccaaagagtgtccgatagatcgttcaggccgcgtggcagacttgaccgagcaatataatgagcaatacggagcagtgcgtacgccttacaccatgagctatggggattcattgtattacaacaacgcgtacggagcgctcgatgcctactacaagcgctgccgtgctgcccggtcctatgaggcagtggcagctgcagctgcctccgtgtataattacgcagagcagaccctgtcccagctgccacaagtccagaatacagccatggccagtcacctcacctccacctctctcgatccctacgatagacacctgttgccgacctcaggagctgctgccacagctgctgctgcagcagcagccgctgctgctgttactgcagcttccacttcatattacgggcgggatcggagccccctgcgtcgcgctacagccccagtccccactgttggagagggctacggttacgggcatgagagtgagttgtcccaagcttcagcagccgcgcggaattctctgtacgacatggcccggtatgagcgggagcagtatgccgatcgggcgcggtactcagccttttaaagcttgaggtgggatgtgtgtgggctgaaattccgagctgcggttgtgcatgagaatacacccttcgtggtaccccatctccgggacgttctcggctctgtgcgttcagtccctcaggaaccgtggaccttaatttaccttgctaagttcagaccttctcttcctttcctttcctttcctctcctgcccattttcctgttcttctgtccttcaatacttctgtagcttcccattcatgttctcttctcccagcaggcctcattgtgtgcagaaactgtggtgggggctgtgctgtctcctccctgcctcctgcctcctgcggctgttggatttgggaatgaccttggtgagagtctcactgctccagggtctctttttggtccaaaggctagacctatagagttggatcactttttttctttccggtgaaataaatggtttttcaactt

SEQ ID NO: 4446 - DNA, 1548 bp, Homo sapiens
  source 1..1548: mol_type = genomic DNA
gttttgtcagaagcgtccgcgccgcgaggaggaggccctgctggtttctgtgcgggctcttgtcaggatggtgaagctgttcatcggaaacctgccccgggaggctacagagcaggagattcgctcactcttcgagcagtatgggaaggtgctggaatgtgacatcattaagaattacggctttgtgcacatagaagacaagacggcagctgaggatgccatacgcaacctgcaccattacaagcttcatggggtgaacatcaacgtggaagccagcaagaataagagcaaaacctcaacaaagttgcatgtgggcaacatcagtcccacctgcaccaataaggagcttcgagccaagtttgaggagtatggtccggtcatcgaatgtgacatcgtgaaagattatgccttcgtacacatggagcgggcagaggatgcagtggaggccatcaggggccttgataacacagagtttcaaggtgaaccaccctctttgggtagagggctgaacacaaggctgtgtgcagaaaatggttggataagtaaaaggagaggtttggtaaagataacagctgttggctggctggtgatgaagaaataagtgtgggtgatggacttcttatgatgtagaatgcatgggacttaggggctttaccttaggcaaatgtctcctggagaaaagccactcaccttttatttggagcccctacggcttttgtgcttatcagtgcagaaacccttttctttgaaggctttctgagttactgggccttttttattttttatttttttgtagtagagcacagttcagagttcctcactctgaatttattgccctcagcacaggatcagaattctgcattttacgtgaagaacctctcaaaaacatgtcaagcgacacttataggaccagaatccttgttaagctgtcctaccttacacaaactctttaaagggttacagctcttgttgcttttatattatacctgtaccaagggattgtattttgagtttaaggccactctagaattacaaggctgattttaggacttcctggggaggaggcactggggttttaggggcggtaatgactgtcttttcattggtttggggggctggactttataagattttggtgaatagagcacttagatttgtgttatcttggagtcttaaccaaatgaatcttttgtgcctggagggcagcatgggtgatatgtggattgtcacttcatttggaagcatctcaaatccccagcattttgaatgcctacatgttgctcaaaggaaatgcttgttagagcattttggattttgaattttcagatttgggatgctaaaatggtacgtagaacgcaaatattccaaaatctgaggtctgaagcaacagtggcagttcaggggtggtgatcatggtgagttgctatctgaactcttctttcacctcctttgggttcccagtgtcaaaaagagtggtgtccttttttagcttaattaagcaggactgaacaaaaataataaaaaataaaaaaagccttattcaaatta

SEQ ID NO: 4447 - DNA, 1694 bp, Homo sapiens
  source 1..1694: mol_type = genomic DNA
actttcttgagtggccaatccggttgtaggctcacctcccccttctactcagagcactgctgcggccgccgccattttagcgttttgtcagaagcgtccgcgccgcgaggaggaggccctgctggtttctgtgcgggctcttgtcaggatggtgaagctgttcatcggaaacctgccccgggaggctacagagcaggagattcgctcactcttcgagcagtatgggaaggtgctggaatgtgacatcattaagaattacggctttgtgcacatagaagacaagacggcagctgaggatgccatacgcaacctgcaccattacaagcttcatggggtgaacatcaacgtggaagccagcaagaataagagcaaaacctcaacaaagttgcatgtgggcaacatcagtcccacctgcaccaataaggagcttcgagccaagtttgaggagtatggtccggtcatcgaatgtgacatcgtgaaagattatgccttcgtacacatggagcgggcagaggatgcagtggaggccatcaggggccttgataacacagagtttcaaggcaaacgaatgcacgtgcagttgtccaccagccggcttaggactgcgcccgggatgggagaccagagcggctgctatcggtgcgggaaagaggggcactggtccaaagagtgtccgatagatcgttcaggccgcgtggcagacttgaccgagcaatataatgagcaatacggagcagtgcgtacgccttacaccatgagctatggggattcattgtattacaacaacgcgtacggagcgctcgatgcctactacaagcgctgccgtgctgcccggtcctatgaggcagtggcagctgcagctgcctccgtgtataattacgcagagcagaccctgtcccagctgccacaagtccagaatacagccatggccagtcacctcacctccacctctctcgatccctacgatagacacctgttgccgacctcaggagctgctgccacagctgctgctgcagcagcagccgctgctgctgttactgcagcttccacttcatattacgggcgggatcggagccccctgcgtcgcgctacagccccagtccccactgttggagagggctacggttacgggcatgagagtgagttgtcccaagcttcagcagccgcgcggaattctctgtacgacatggcccggtatgagcgggagcagtatgccgatcgggcgcggtactcagccttttaaagcttgaggtgggatgtgtgtgggctgaaattccgagctgcggttgtgcatgagaatacacccttcgtggtaccccatctccgggacgttctcggctctgtgcgttcagtccctcaggaaccgtggaccttaatttaccttgctaagttcagaccttctcttcctttcctttcctttcctctcctgcccattttcctgttcttctgtccttcaatacttctgtagcttcccattcatgttctcttctcccagcaggcctcattgtgtgcagaaactgtggtgggggctgtgctgtctcctccctgcctcctgcctcctgcggctgttggatttgggaatgaccttggtgagagtctcactgctccagggtctctttttggtccaaaggctagacctatagagttggatcactttttttctttccggtgaaataaatggtttttcaacttag

SEQ ID NO: 4448 - DNA, 680 bp, Homo sapiens
  source 1..680: mol_type = genomic DNA
ggtaaacagctgtgtgaagagtgatgagcatgtcctggaggagctggaaacagaaggggagaggcagctgaaaagcctccttcagcatcaacttgatacttctgtctccattgaggaatgtatgtctaagaaagagagctttgctcctggtactatgtacaagccctttgggaaggaagcagctgggactatgactttgtcccaattccagacactgcatgagaaggaccaggaaactgcttctctcagggaattagggcttaatgaaacagaaatcttgatctggaagagccatgtttctggtgaaaagaagacaaaactgagggcaactcctgaagcaatacagaaccgtcttcaagatattgaagaaaggatctcggagcgtcagcgcattctttgcctgccacagagatttgcaaagagcaaacagctgacccggcgagaaatggaaatagaaaagtctttatttcagggagctgatcgtcactccttccttaaggctctttattaccaagcataccacaaaaagacaagtgcagacaagtacatgacctcaatgaagaggaagataaaattaggcacaaaaggtattatacctgaagaaccttagccctcgggtgactgaaagagatcttgtgtcattgttcgctcggttccaggagaaaaaaggacctccaatt

SEQ ID NO: 4449 - DNA, 1662 bp, Homo sapiens
  source 1..1662: mol_type = genomic DNA
acccaagttggaggtaggggcctgtggaaacatgaagagggtaaacagctgtgtgaagagtgatgagcatgtcctggaggagctggaaacagaaggggagaggcagctgaaaagcctccttcagcatcaacttgatacttctgtctccattgaggaatgtatgtctaagaaagagagctttgctcctggtactatgtacaagccctttgggaaggaagcagctgggactatgactttgtcccaattccagacactgcatgagaaggaccaggaaactgcttctctcagggaattagggcttaatgaaacagaaatcttgatctggaagagccatgtttctggtgaaaagaagacaaaactgagggcaactcctgaagcaatacagaaccgtcttcaagatattgaagaaaggatctcggagcgtcagcgcattctttgcctgccacagagatttgcaaagagcaaacagctgacccggcgagaaatggaaatagaaaagtctttatttcagggagctgatcgtcactccttccttaaggctctttattaccaagatgaaccccaaaagaagaacaaaggtgatcccatgaacaacctggaaagtttttaccaagagatgataatgaaaaaacgtcttgaagagtttcaacttatgagaggtgaaccctttgcttcccactcactggtctcagctacatcagtgggtgatagtggcacagctgagagcccatcattactccaggacaagggaaaacaggcagcacagggtaaaggccccagtctccatgtggcaaatgttattgatttttcacctgagcagtgttggactgggcctaagaagctgacgcagccaatagaatttgtcccagaagatgaaatccagagaaatcgtttgtcagaggaagagatccgaaaaattcctatgttttcttcatataatccaggggaaccaaacaaggtattatacctgaagaaccttagccctcgggtgactgaaagagatcttgtgtcattgttcgctcggttccaggagaaaaaaggacctccaattcaattccgaatgatgactggacgaatgaggggccaggcttttatcacctttcccaataaggagatagcatggcaagcattgcatctagtaaatggatacaaactacatgggaaaatattggtgatagagtttggaaagaacaaaaagcaacggtcaaatctccaagcgacttctctcatatcatgtgctacaggtagcactacagaaattagtggtagctagaatatatataaattgtgggtcctggatggtctttcttgaattggaatcttggatctaggatttatgtatagacaccagtttgtttggagttgaagaggaaaaactaactgagggaggggaaaaaagtaatttcagcttttggagagaactggtagaaaacattttctattatataattgaagactatataggacagatgatatgctgagtatgaagggtaaagtgcaaagagtattattttctcaggatgaattacaacggattattcctaaggatttttaaaaatctttataatttttctggggtcctcaatatttgtctctagagataacattctttcttagactgcttcgtatacacagaaataaaaaactaattaaatgttgaaa

SEQ ID NO: 4450 - DNA, 2579 bp, Homo sapiens
  source 1..2579: mol_type = genomic DNA
aagttggaggtaggggcctgtggaaacatgaagagggtaaacagctgtgtgaagagtgatgagcatgtcctggaggagctggaaacagaaggggagaggcagctgaaaagcctccttcagcatcaacttgatacttctgtctccattgaggaatgtatgtctaagaaagagagctttgctcctggtactatgtacaagccctttgggaaggaagcagctgggactatgactttgtcccaattccagacactgcatgagaaggaccaggaaactgcttctctcagggaattagggcttaatgaaacagaaatcttgatctggaagagccatgtttctggtgaaaagaagacaaaactgagggcaactcctgaagcaatacagaaccgtcttcaagatattgaagaaaggatctcggagcgtcagcgcattctttgcctgccacagagatttgcaaagagcaaacagctgacccggcgagaaatggaaatagaaaagtctttatttcagggagctgatcgtcactccttccttaaggctctttattaccaagatgaaccccaaaagaagaacaaaggtgatcccatgaacaacctggaaagtttttaccaagagatgataatgaaaaaacgtcttgaagagtttcaacttatgagaggtgaaccctttgcttcccactcactggtctcagctacatcagtgggtgatagtggcacagctgagagcccatcattactccaggacaagggaaaacaggcagcacagggtaaaggccccagtctccatgtggcaaatgttattgatttttcacctgagcagtgttggactgggcctaagaagctgacgcagccaatagaatttgtcccagaagatgaaatccagagaaatcgtttgtcagaggaagagatccgaaaaattcctatgttttcttcatataatccaggggaaccaaacaaggtattatacctgaagaaccttagccctcgggtgactgaaagagatcttgtgtcattgttcgctcggttccaggagaaaaaaggacctccaattcaattccgaatgatgactggacgaatgaggggccaggcttttatcacctttcccaataaggagatagcatggcaagcattgcatctagtaaatggatacaaactacatgggaaaatattggtgatagagtttggaaagaacaaaaagcaacggtcaaatctccaagcgacttctctcatatcatgtgctacaggttgaagaagctgagtggaagcaaaactgtcttgtactaaagaactgactccagatggtaagacaaatccacaggaacaaatggagagaacgtgaaataggaaataagtttaatataaaaaaactataaacatatacttactcttctctcagcttcttttaaagatgtaaaattatattaagtaattataataatgtgtgttgggtttgtaatgtataggaataacatatataacaataataccacaaagcgggggatgggtttatataggaatagggttgttacattggaattaagttagtgtttatctgaagcctattctgtttagttaagatgtgtatggtaagccctagagcaaccactgaggaaataacttttaaaaaatcaaaaatattattaaatgtaaatatcacattatgaaataatgcaaaagaaggaatggagaagcaaaaagcttgaggcatatcaaaaacaataaaatggcagtcataagtcttcctatatcaaaataacaatgtgcatggattaagcaatactataaaaggcagagatgtcagaaacaagtctgattccacttcatgccatctatttgagacacactttagaagatagaaagagattaaaggtaaaaggatggaaaacaaatatatcacacagacaacagccataagaaagctggagtggctattctaataccagacaaaatagacttaaaaaaatgttactggagataaagagtaaaatgttacaatgataaaagggtcaatacatcaggaagatgtaacaactataaatatatatgcatctaacagtagagcccaaaatacatgaagcaaaaactgaaaggaaaggagaaacagataagtccataaaaagagttggaatattcaatacccctttttcaataatagagcacctagacagaagataaaccaggaaatagaagacttgaacaacattataaggcaaattgacctaaaagacatctatagaactttccacccaacatcagaatacatattcttctcgagtgcatatgaaacatctccaaaataggtcataagttaaagcataaaacaagccttaataaatataagtagactgaaatcatgcaaagcatgccctctgaccacatgggatgaagttagaaaacaatgaaaagttgggaaactcacaaatatgtggaaatcagacacacttgtaagtgactggctgggtgcagtagctcacgcctgaaatctcagcactttggtaggccgaagtgggaggattccttggatcccttgagaccaggaattcaagaccagcctgggcaacacagcaagaccctgtcattacc

SEQ ID NO: 4451 - DNA, 672 bp, Homo sapiens
  source 1..672: mol_type = genomic DNA
gacttgaggtccgcggcctatttacccaagttggaggtaggggcctgtggaaacatgaagagggtaaacagctgtgtgaagagtgatgagcatgtcctggaggagctggaaacagaaggggagaggcagctgaaaagcctccttcagcatcaacttgatacttctgtctccattgaggaatgtatgtctaagaaagagagctttgctcctggtactatgtacaagccctttgggaaggaagcagctgggactatgactttgtcccaattccagacactgcatgagaaggaccaggaaactgcttctctcagggaattagggcttaatgaaacagaaatcttgatctggaagagccatgtttctggtgaaaagaagacaaaactgagggcaactcctgaagcaatacagaaccgtcttcaagatattgaagaaaggatctcggagcgtcagcgcattctttgcctgccacagagatttgcaaagagcaaacagctgacccggcgagaaatggaaatagaaaagtctttatttcagggagctgatcgtcactccttccttaaggctctttattaccaagcataccacaaaaagacaagtgcagacaagtacatgacctcaatgaagaggaagataaaattaggcacaaaaggcatcattcccaacccaccataa

SEQ ID NO: 4452 - DNA, 990 bp, Homo sapiens
  source 1..990: mol_type = genomic DNA
gacttgaggtccgcggcctatttacccaagttggaggtaggggcctgtggaaacatgaagagggtaaacagctgtgtgaagagtgatgagcatgtcctggaggagctggaaacagaaggggagaggcagctgaaaagcctccttcagcatcaacttgatacttctgtctccattgaggaatgtatgtctaagaaagagagctttgctcctggtactatgtacaagccctttgggaaggaagcagctgggactatgactttgtcccaattccagacactgcatgagaaggaccaggaaactgcttctctcagggaattagggcttaatgaaacagaaatcttgatctggaagagccatgtttctggtgaaaagaagacaaaactgagggcaactcctgaagcaatacagaaccgtcttcaagatattgaagaaaggatctcggagcgtcagcgcattctttgcctgccacagagatttgcaaagagcaaacagctgacccggcgagaaatggaaatagaaaagtctttatttcagggagctgatcgtcactccttccttaaggctctttattaccaagcataccacaaaaagacaagtgcagacaagtacatgacctcaatgaagaggaagataaaattaggcacaaaagatgaaccccaaaagaagaacaaaggtgatcccatgaacaacctggaaagtttttaccaagagatgataatgaaaaaacgtcttgaagagtttcaacttatgagaggacttaccagttttcccagagaagacttccaaaatctttcttacgagggtactaccagcgttctaggagccaaatggcagaaaaggactgggaggacctcaacatttagtattctcttagtttccttgctttcagaaacagtgttcacatcttcagccatgtatggcattccccatcttctgacaatgagcctcaagttttctaccaggattggcaagttatcttttaccccatag

SEQ ID NO: 4453 - DNA, 1649 bp, Homo sapiens
  source 1..1649: mol_type = genomic DNA
ggggagagtagacagcagaaccagcggcggcggctaagcagagactgtagtagcggcgacagcgacgacggcagcgatggctggggcggggccagccccgggactcccgggtgcaggaggacccgtggtcccgggtcctggcgctggcatcccgggcaaaagcggcgaggaacgcttgaaggaaatggaggcggagatggccctgtttgagcaggaagttctgggggctccagtacctggaatcccaactgctgtgcctgcggtgcccactgtccccacggtccccacagtagaagcgatgcaggtcccagcggctcctgtgatccgcccaattatcgcgaccaacacataccagcaggtccagcagactctggaggcccgagcagctgctgcagccacagtagttcctcccatggtgggtggccctccttttgtaggccctgttggctttggccctggtgatcggagtcacctggacagcccagaggctcgagaagccatgttcctgcggcgggcagctgtggccccccagagggcccctatcctgcgtccagccttcgtcccccacgtgctacagagagcagattccgctctctcctctgcagcagccggcccccgccctatggccctacggccccctcaccaggccctcgtgggcccccctctgcctgggccccctggaccacccatgatgctgccaccaatggctcgggctccagggcccccgctgggctccatggctgcactgaggccccctctggaagagccagcagcaccccgagagctgggcctaggcctggggttgggcctgaaagagaaggaagaggcagtggtggcggcggcggctgggctggaggaggctagcgcggctgtggccgtgggggcaggaggtgccccagctggccctgcagtcattgggcccagcctgccgctggccctggccatgccattgcccgagcctgagcccctgcccctcccgttggaggtcgtccgcggcctcctgcccccgctgcgcattcctgaactcctgtccctgcgtcctcggccccggccccctcggccagagccacccccaggcctcatggctcttgaggtcccagagcccctgggtgaagacaagaagaaggggaagccagagaaattgaaacggtgcattcgcacagcggcagggagcagctgggaggaccccagcctgctggagtgggatgcagatgacttccggatcttctgtggggatctgggcaatgaggtgaacgatgacatcttggcacgcgccttcagccgcttcccatccttccttaaggccaaggtgatccgtgacaagcgcacaggcaagaccaagggctacggcttcgtcagcttcaaggaccccagcgactacgtgcgcgccatgcgtgagatgaatgggaagtatgtgggctcgcgccccatcaagcttcgcaagagcatgtggaaggaccggaatctggacgtggtccgcaagaagcagaaggaaaagaagaagctgggcctgagatagggtctgtggccaggcacccgctcccacctggccgggcgctggctcctccctcagttctctttggaaaacccccagctgtccacccatcccctgccccaaaaccagtttcaataaatttacgttcatttcc

SEQ ID NO: 4454 - DNA, 1562 bp, Homo sapiens
  source 1..1562: mol_type = genomic DNA
ggggagagtagacagcagaaccagcggcggcggctaagcagagactgtagtagcggcgacagcgacgacggcagcgatggctggggcggggccagccccgggactcccgggtgcaggaggacccgtggtcccgggtcctggcgctggcatcccgggcaaaagcggcgaggaacgcttgaaggaaatggaggcggagatggccctgtttgagcaggaagttctgggggctccagtacctggaatcccaactgctgtgcctgcggtgcccactgtccccacggtccccacagtagaagcgatgcaggtcccagcggctcctgtgatccgcccaattatcgcgaccaacacataccagcaggtccagcagactctggaggcccgagcagctgctgcagccacagtagttcctcccatggtgggtggccctccttttgtaggccctgttggctttggccctggtgatcggagtcacctggacagcccagaggctcgagaagccatgttcctgcggcgggcagcagccggcccccgccctatggccctacggccccctcaccaggccctcgtgggcccccctctgcctgggccccctggaccacccatgatgctgccaccaatggctcgggctccagggcccccgctgggctccatggctgcactgaggccccctctggaagagccagcagcaccccgagagctgggcctaggcctggggttgggcctgaaagagaaggaagaggcagtggtggcggcggcggctgggctggaggaggctagcgcggctgtggccgtgggggcaggaggtgccccagctggccctgcagtcattgggcccagcctgccgctggccctggccatgccattgcccgagcctgagcccctgcccctcccgttggaggtcgtccgcggcctcctgcccccgctgcgcattcctgaactcctgtccctgcgtcctcggccccggccccctcggccagagccacccccaggcctcatggctcttgaggtcccagagcccctgggtgaagacaagaagaaggggaagccagagaaattgaaacggtgcattcgcacagcggcagggagcagctgggaggaccccagcctgctggagtgggatgcagatgacttccggatcttctgtggggatctgggcaatgaggtgaacgatgacatcttggcacgcgccttcagccgcttcccatccttccttaaggccaaggtgatccgtgacaagcgcacaggcaagaccaagggctacggcttcgtcagcttcaaggaccccagcgactacgtgcgcgccatgcgtgagatgaatgggaagtatgtgggctcgcgccccatcaagcttcgcaagagcatgtggaaggaccggaatctggacgtggtccgcaagaagcagaaggaaaagaagaagctgggcctgagatagggtctgtggccaggcacccgctcccacctggccgggcgctggctcctccctcagttctctttggaaaacccccagctgtccacccatcccctgccccaaaaccagtttcaataaatttacgttcatttcc

SEQ ID NO: 4455 - DNA, 4192 bp, Homo sapiens
  source 1..4192: mol_type = genomic DNA
cgggtggaaggaccgcccttttcttcgtagcctccaagggagctggaacaaaaaacgaaaccaaaacctgcctgctcgctcctctccccatcgcctgcgttccgctggttgtgggctttctgcggccgctgagggcgcgtctcccctccgccatggcatcagttttgaatgtcaaggaatccaaagctcctgaaagaacggttgtagttgctggtcttccagttgacctttttagtgatcaattattggccgtattagtgaagagccacttccaagacattaagaatgagggcggagatgttgaagatgtgatatatccgacaagaaccaagggagttgcatatgtaatattcaaagaaaaaaaagttgcagagaatgtcatcagacaaaagaaacactggctagcaaggaagactagacatgctgaactcacagtctctctcagagtctctcattttggtgacaagatcttcagctctgtaaatgccatccttgatctttctgtttttggaaaagaagttactctagaaactctggtaaaagacctgaaaaaaaaaatcccgagtttaagcttcagtcctttgaaacccaatggaagaatctccgtggaaggatcatttctggctgtcaagaggctcagagaatctttgctagcaagagcatgttctctcttagaaaaagacagaaattttaccagtgaggagagaaagtggaatagacaaaatccccagaggaatctacagagaagtaataactctttggcatcagtcaggaccttagtacctgagactgctagaagtggagaaatgcttgtgcttgacacagatgtttttctttacctgaaacacaagtgtggatcttatgaaagcacactgaaaaaattccacattctgagtcaggagaaagtggatggtgaaatcaccacaatttgtctaaaaagcattcaagttggttctcagccaaacaatgcaaaacatgtaaaagagctcattgaggaatggtcacatgctctttacttaaagcttagaaaagagacatttattttggaaggaaaggaaaatagagagaaaagaatgatcaaaagggcatgtgaacaattaagttcgagataccttgaagtcctgattaacctttataggacacacattgacattataggatcttcttctgacacttacctgtttaaaaaaggggtcatgaaattaatagggcaaaaggttagttaataaaatctcagcaatatagtcataagggctgctttctcttgctgagcagtgaccattgccatgaatgaggctagctttacacaccgtatctcatgaatccttatagtcatccttctttgtcagtgttgactatcctcatgttacagcggaagaaactaggatttggagaagttaaaacacttttctgaagttatccagttgacaaagaatgaggctgtggcttagcccagtctatctgattacacagataatatctaaggaataaaactttgaaaaaaactcaccaaacttttttttttttttttttgagatggagtctcgctctgttgtccaggctggagtgcagtggcgtgatctcggctcactgcaacgtccacctcctgggttcacaccattctcctgcctcaacctctggagtagctgggactacaggtgcccaccaccacgcccggctaatctttttgtatttttttagtagagatggggtttcaccgtgttagtcaggatggtctccatctcctgaccttgtgatccacccgcctcggcctcccaaagtgctgggattacaggcgtgagccactgcgcccagcaaactcaccaaactttgaaggaatcttactttctctgtaactccaaattattagagaataataattattaagaagtagccttaacatatgagaaatttgaaaggtgattattatgccatgggcaatttcttaacatttacagtttgtgtttactccgtgtagaattagaatactggcaaaaatcactggggaaactacttagatggaaagcatatcttatgcaggtaatcattatttgactaaattctattgtttcaaggctgctggccacataggatgtttttactatttttttagcctaagtgcttacataaaatggtgattcttttataattgtgcaagttgataatattaattgagtcattcttgtcacatccaactaaaacagactcaagaagctagggggaaaaagtacttgggacacataatattgctccaagaatgtaattctctgtgagcctggctactgaaactgcttgctgtaacctgagaccagttttgtctatagctgctgagataacttgctgtaactctaggactaattttacctatggccattgcccaccagttggagcttgccagctccccagggctttactaataccaatgaactttctcttaagatcacaagttggccgggcgtggtgactcatacctgtaatcccagcactttgggaggccgaggcgggtggatcacaaggtcaggagattgagaccatcctggctaacatggtaaaaccccatctctactaaaaatacaaaaattagccgggcatggtggtgggcgcctgtagtcccacctactcgggaggctagaggctgaggcaggagaatggcgtgaacccgggaggtggagcttgcagtgagccaagactgcactactgcactccagcctgggtgacagagcgagactccgtctcaaaaaaaaaaaaaaaaaaaaaagaaagaccacaagtaacattcttagttttaaataaaaccctcaaccttctctttgtttgttggacatactaaagatcacctagaattgaaattctttcttctcaaaacattaaatttagttttgtgtctacattttcattttgactttgacatgcatggtgtcagaagtgggatacaaagctgactcacctcatggagaatcattggcctttggagttatggcatgaggtacccatgttggggccctttgaaccccctacacccccaccactttcacaggtaatcctttctccctccagtaagtatctcttggacagaactctcagatatggttcgagttctgttttatttgggatatgattagggagaggtctttccccctcttgtttggtagatctgttgggtagaattattttccccctgttgacctcagctgcgaggtttggaccttgaggcttggatgagggaatttttccctttctttggagaaggcttatcattcttactggtaagcatgtattttattttctgtcctgtcttgtatttatttggcctttgtgtattcagtgcttgcatttacttggcttttgcatagttgacattaaatcagagcacccacgaaatgagctctcaaagttcaaaggcatgccagaatattttctggaactccagctagtaacatattcaaacattacagggatcatttagtctgtttttcttaaaactgaactaaaagatggaggctataaaatcatacactccaaataagatatgcatatttcattgatatcttgaggctaaaaaaaaataaaaacaaaaacaaaacacattcaggatacaaatattgccttgttaaaaaatactgtctcaaaggtggctgaaactttcttttctagacctttcccctccccttcttacagtatcccctctttatccttctctaaacagctattctaacatactacttaaataaaaacacttgaaaaccagcagatataaaacaaagtcattttgaccttcctactgttttttttttaaagcaaagattaaattcccatgtaaaaccttcctccctatacaaaaaagaatagcagcatttttatcttcaatgacaaagaattgagtccaagaaaatactgtataaaccttgttaaaaatcactcttgtcttttggtcctactcacataattcagcacactttcacagttaactattttttgttcaatttagtgcactggtgagtgactcaaactgctttatcccaaatttgatttacagcctttataagattgcctattaaaaaagcttaaagcttatccttagcccattttgtcagaaaaataatttgcatctaatcatttttataaactggtgaatttacgtgttttactatatcatgactaaaattctaaaataaaagttttaatatcttta

SEQ ID NO: 4456 - DNA, 4282 bp, Homo sapiens
  source 1..4282: mol_type = genomic DNA
gttacccaacaggcgccgcggctgctccggtggcgccactgactcggaggcggctgcggagagcggggcgctggcccgtggaggcggcagcggcggcggctttctagcggatccgagattatatatctttgaatgatgcaggccactgcagtggtggagacagcatctggtaaaggctaccacagtaatggaggcaacctccaaaaagataaaccttcaaatccaaagaaagaaaatttgttattatcctccaatggttgtgatgaagtcaaattgacttttcctgatgatgactggaattcttcgacactagagcaaagagctaataataaagaaatcagcaatattgacaaaatggatttattagagccatttttttcagtgagtcaagatactaacacagagagtactcagtttcagtcaagtgaacttgaagacagtactgactatgctttcttgaataaaacatattctataccttattcagagtcaaaactaaagaaggaaagtcttactcctttaagttcagaattagatcctgaagtgcagaaaaaagaggaggttttttttaatattttggaacatcaagataagactgttggcttggaaagaatctacaatatttcagatgctaattatagagaaagtgctgaagatacacaaaagcatgatacagatgaagactcacagcaggaatatcacagtgcagaagaacaagaatacataagtaaccatttatcttttgaccaaacaaaagcattagatatatctaatccagaagttgttgaattaggaaattcgggttatgaagttaaatgtgctagcaatgtagaagataatcgtgttaactcgggaagtggttctatcatctctttcgattcacttgatgtttatggacaagaagagtcacttcatgtctccaaatttcagaattctgttatgttaagagaatatcatgacctaaagcatgaaaagtataaggaacaagagactaattcaatgtaccacactgtatttgatggcagtgtactaagaagcaattctccaggaaaccaggaatctcaatctaagagtggttccttgagccctcaaaaagtattaaaaatgaaaatttatactgaaaacatgaaatctcaaataaatgaaggtaaagatttttgtggaaataaaattgttgagaacaaaatattactgcaccttgaaaatcctagcacattaccacaggataaagctttagagacattactccaaccctgtaaagattgtcaaacttcctggacctctgtttttgatgattcgataatttctgcctgtggatattatgaaagcctacaaaacactgctgactcagccttagatttttctgctatgctaccaaagatcgcagtcagagataatcaggcaatagaagataatacgtccctaaaagttgctcatagcagtaccacaaagaaaacatgctttcacaatataggagaaatgtgtactaaatcattgacagatgcagcaagttgtacagtcacaattaatcagacagtggacgttagcactgattttagggcttgtttcacaaccagcagggcaacaagtgcaagaccttctgtagtatctacatcaagcaacacagagataacaatgatgaataaaaaacgacctgatgaatggcaaaatgagaaacaaaaaagtgtggcttgtagtacagattggtcatacagtgaagattgtatagatacacagatggctataacaaaaggatcaggaaaatctctctccgttgacagtttaaaacctaatggaaattttctaaataaggatttcctggaattaagaaaagcatgtggtatcacagacctaaagaaacatcctgagagggaatttcaactttttaaagatacagagaaggatttgccatcaatgtgctgtcagaagataatgcagagagccataaaagcagagctgcaccttttaaatgttcactatcagatgtgtcgtcgccattgttgtgatatttacaaacttgtcatggaaaatagggaaggattaaatatgaatttatcaagtaattctgctaagaaggaattgggatcagcactactgtctcttttgggggacttaaaagttagatatgtgactttgaaagaaaaaatacacaaaggcataccactggaagagctgcccccactgtcactagaatcaaaattattatctaccttctctacttttgcttccaggctaatgaaaaaagaaacacatgtcttttcagaagcagatgctgaacaagataatcagagggctcatgatgttgatgtttcttcaaacctaaaaaagacactctctcaaatgtctttatcatctgacaatagtcatgctacacaaaacatatcacccaagaaagatgactttaaaaatggtgatataaatgcagactttagtcaactgaaacttggtgataaagactgcagacattaccaagagacaagcgaagactggtctgatgctaaagagagcctgacaggagttgacgtctcagggacacagggaaatcaagtagaacaagacacatggaatttggatcttacaggagaaatgaagaatgttgaaccctcacaaagagataaaggttatttgatacatgttggtggcctctgcccttcagtatctgaggccgatttaaggtctcatttccaaaaataccaagtttctgaaatttcaatttatgattctactaattacagatatgcatctcttgcttttacaaaaaacagcgatgcaaagatagctgtgaaagaaatgaatgggatagaaataaatggaaagtcagtaaatgtgtggcctgttaaaattcttggagaatatacatcaccactttcctccaaaaatgggaatagaattagttcgaataatttagagaaaagcaccaacaaacaaatccactcagaattctccatttctagattgcccagaactaggccacggcagctgggttctgagcaagacagtgaggttttcccttccgaccagggtgtcaagaagaattgtaagcagattgaatctgctaaattattacctgatacacccgttcaattcatacctccaaatacattgaaccttcgtagctttaccaagatcataaagagactggctgaactgcatccagaagtcagcagagaccatattataaatgcacttcaggaagtgagaataagacataaaggttttctgaatggcttatctattactactattgtggagatgacttcatctcttctgaaaaactctgcttccagttaggaattcaaaaaacaataaagagaacttccttggaaagtgtgtttcctccttcagagaatgttctacagcacttaggaaaaagtagtaataacaagatgatgtaattaaataggctctataaatgggctaagctgttaaaatattctactttatatccctcctttaaaatctagcaacagttgtctatacaatattaagatcttctctatatatttaaagttaaaatataatttttaataagtttttaaatttttttatttcaattttgttacttagaacattaagatgcatatttgtgatctaaagaaattgtcttgtccattttaaaaacctttattaagtcacttttaaaatgtattgaccaagaaggaggtttgttgttacatcaatgtttgtgaaatgatttccatacataaaaaatgtaatttacctgaactttgtcttaagactcttacattggattataggataacagataaataaactgtatagatacattcagtatcatacaacattttggaatgtgtatgctttcaggcttccaagataattaaattactgtcatgatacatttcatgcattttttatgacttcagtataaaacattcaggtgtgttagccttccctgggaagggtaaacttgtatgtgctttggtaaagtacttaaattccaatgttccctatagtgcttgcattcattttgtgaaaagttttgttgtattgttagaacaattttcaaaggctgattttatgccttatctgatagaaatatagaatagatagttctttaattgcttactttttaaaagtaatataatatttaagttgcatttttattaatagtaagattaacatttaagtctgcattttctttaaatgttttaaatgtttatagcattcaatgtgtagttggatttacttgactaaaaattagccctttaacgtttatatttgttgtatttatatttaataaaggcatctaatctttagt

SEQ ID NO: 4457 - DNA, 3449 bp, Homo sapiens
  source 1..3449: mol_type = genomic DNA
gaaattcgcacatatgcttcttcttgccgtggagactgatggagcctctgctgcggggcggggactctagcgagagggggacgtgaagttcgttccgtactcaggcgtgtgtgcccctgaccgacgcgtaggacgccctggaggacggcgccagctcctgacctagtgtgaggtgcccggacggtttccctaagaagcgcgtatttaagatgagatctgaagttgagcgtgaactcaagattatatatctttgaatgatgcaggccactgcagtggtggagacagcatctggtaaaggctaccacagtaatggaggcaacctccaaaaagataaaccttcaaatccaaagaaagaaaatttgttattatcctccaatggttgtgatgaagtcaaattgacttttcctgatgatgactggaattcttcgacactagagcaaagagctaataataaagaaatcagcaatattgacaaaatggatttattagagccatttttttcagtgagtcaagatactaacacagagagtactcagtttcagtcaagtgaacttgaagacagtactgactatgctttcttgaataaaacatattctataccttattcagagtcaaaactaaagaaggaaagtcttactcctttaagttcagaattagatcctgaagtgcagaaaaaagaggaggttttttttaatattttggaacatcaagataagactgttggcttggaaagaatctacaatatttcagatgctaattatagagaaagtgctgaagatacacaaaagcatgatacagatgaagactcacagcaggaatatcacagtgcagaagaacaagaatacataagtaaccatttatcttttgaccaaacaaaagcattagatatatctaatccagaagttgttgaattaggaaattcgggttatgaagttaaatgtgctagcaatgtagaagataatcgtgttaactcgggaagtggttctatcatctctttcgattcacttgatgtttatggacaagaagagtcacttcatgtctccaaatttcagaattctgttatgttaagagaatatcatgacctaaagcatgaaaagtataaggaacaagagactaattcaatgtaccacactgtatttgatggcagtgtactaagaagcaattctccaggaaaccaggaatctcaatctaagagtggttccttgagccctcaaaaagtattaaaaatgaaaatttatactgaaaacatgaaatctcaaataaatgaaggtaaagatttttgtggaaataaaattgttgagaacaaaatattactgcaccttgaaaatcctagcacattaccacaggataaagctttagagacattactccaaccctgtaaagattgtcaaacttcctggacctctgtttttgatgattcgataatttctgcctgtggatattatgaaagcctacaaaacactgctgactcagccttagatttttctgctatgctaccaaagatcgcagtcagagataatcaggcaatagaagataatacgtccctaaaagttgctcatagcagtaccacaaagaaaacatgctttcacaatataggagaaatgtgtactaaatcattgacagatgcagcaagttgtacagtcacaattaatcagacagtggacgttagcactgattttagggcttgtttcacaaccagcagggcaacaagtgcaagaccttctgtagtatctacatcaagcaacacagagataacaatgatgaataaaaaacgacctgatgaatggcaaaatgagaaacaaaaaagtgtggcttgtagtacagattggtcatacagtgaagattgtatagatacacagatggctataacaaaaggatcaggaaaatctctctccgttgacagtttaaaacctaatggaaattttctaaataaggatttcctggaattaagaaaagcatgtggtatcacagacctaaagaaacatcctgagagggaatttcaactttttaaagatacagagaaggatttgccatcaatgtgctgtcagaagataatgcagagagccataaaagcagagctgcaccttttaaatgttcactatcagatgtgtcgtcgccattgttgtgatatttacaaacttgtcatggaaaatagggaaggattaaatatgaatttatcaagtaattctgctaagaaggaattgggatcagcactactgtctcttttgggggacttaaaagttagatatgtgactttgaaagaaaaaatacacaaaggcataccactggaagagctgcccccactgtcactagaatcaaaattattatctaccttctctacttttgcttccaggctaatgaaaaaagaaacacatgtcttttcagaagcagatgctgaacaagataatcagagggctcatgatgttgatgtttcttcaaacctaaaaaagacactctctcaaatgtctttatcatctgacaatagtcatgctacacaaaacatatcacccaagaaagatgactttaaaaatggtgatataaatgcagactttagtcaactgaaacttggtgataaagactgcagacattaccaagagacaagcgaagactggtctgatgctaaagagagcctgacaggagttgacgtctcagggacacagggaaatcaagtagaacaagacacatggaatttggatcttacaggagaaatgaagaatgttgaaccctcacaaagagataaaggttatttgatacatgttggtggcctctgcccttcagtatctgaggccgatttaaggtctcatttccaaaaataccaagtttctgaaatttcaatttatgattctactaattacagatatgcatctcttgcttttacaaaaaacagcgatgcaaagatagctgtgaaagaaatgaatgggatagaaataaatggaaagtcagtaaatgtgtggcctgttaaaattcttggagaatatacatcaccactttcctccaaaaatgggaatagaattagttcgaataatttagagaaaagcaccaacaaacaaatccactcagaattctccatttctagattgcccagaactaggccacggcagctgggttctgagcaagacagtgaggttttcccttccgaccagggtgtcaagaagaattgtaagcagattgaatctgctaaattattacctgatacacccgttcaattcatacctccaaatacattgaaccttcgtagctttaccaagatcataaagagactggctgaactgcatccagaagtcagcagagaccatattataaatgcacttcaggaagtgagaataagacataaaggttttctgaatggcttatctattactactattgtggagatgacttcatctcttctgaaaaactctgcttccagttaggaattcaaaaaacaataaagaggtaaagtaatcata

SEQ ID NO: 4458 - DNA, 1785 bp, Homo sapiens
  source 1..1785: mol_type = genomic DNA
cgagccggcaaaggcttgggtgtgagacagcagcggtggcagacaccgcagaagcaaagagcagtgaggctcctgcattcgggtggagcaccatggacgaagctggcagctctgcgagcggcgggggcttccgcccgggcgtggacagcctggacgaaccgcccaacagccgcatcttccttgtgatcagcaagtacacacctgagtcggtgctgagggagcgcttctcgccttttggcgacatccaggacatctgggtggtgcgggacaagcacaccaaggagtccaagggcattgctttcgtcaagttcgcccgcagctcacaggcctgcagggccatggaggagatgcatggccagtgcctcggccccaacgacaccaagcccatcaaggttttcattgctcagtcccgatcatctggaagtcaccgagatgttgaagatgaagaacttacaagaatctttgttatgataccaaagtcctacacagaagaagatctgcgggaaaaatttaaggtgtatggagatatcgagtattgcagcattattaagaataaagtgactggagaaagtaaaggtttgggctacgtacgatacttaaaaccatcacaagctgcccaagcaatagaaaactgtgatcgaagttttagagcaatcttggctgaacctaaaaataaagcatctgaatcctctgaacaagattattatagtaatatgaggcaagaagctttgggacatgaacctagagtaaatatgtttccatttgaacaacaatctgaattttcaagttttgacaagaatgatagccgaggccaggaagcaatctccaaacgcttgtcagttgtatcaagagttcctttcactgaagaacagcttttcagcatttttgatatagtaccaggattggaatattgtgaagttcaacgagatccttattcaaattatggtcatggagtggttcagtattttaatgtagcatcagctatttatgcaaaatacaaattacatggatttcagtaccctcctgggaaccgaataggtgtttccttcattgatgatggaagtaatgcaacagatctccttagaaaaatggcaacacagatggtagctgcacagcttgcatcaatggtgtggaataacccaagtcagcaacaatttatgcaatttggaggaagctctggatcacagttgcctcaaatccagacagatgttgtacttccatcatgcaaaaaaaaagctcctgctgaaactcctgtgaaagaaagactttttattgtgtttaatcctcatcctttacctttagacgtattagaagatatattctgtcgttttggtaacctgatcgaagtttaccttgtgtcaggaaaaaatgtggggtatgccaagtatgccgatagaataagtgctaatgatgccattgccactctacatggaaagattctgaatggggtgagacttaaagttatgctggcagattcgccaagagaagaatctaacaaacggcaaagaacttactgattcttgagaacaaagactaaataatgacataatcctcagctgactgactgaaaatgtgactggacgcattccctgtggacagttgacagctttttttttttccatatacctgatagtctgtgtacagcattgttttgtctgggaagcagggattgctgacatgtatttttgaatccatacattaatgctaaaacgaatatagtagttgttccttagagcaatatgttgttacgtgtagcagaaataaagttttctttgcttaactaaa

SEQ ID NO: 4459 - DNA, 757 bp, Homo sapiens
  source 1..757: mol_type = genomic DNA
cacagcttgcatcaatggtgtggaataacccaagtcagcaacaatttatgcaatttggaggaagctctggatcacagttgcctcaaatccagacagatgttgtacttccatcatgcaaaaaaaaagctcctgctgaaactcctgtgaaagaaagactttttattgtgtttaatcctcatcctttacctttagacgtattagaagatatattctgtcgttttggtaacctgatcgaagtttaccttgtgtcaggaaaaaatgtggggtatgccaagtatgccgatagaataagtgctaatgatgccattgccactctacatggaaagattctgaatggggtgagacttaaagttatgctggcagattcgccaagagaagaatctaacaaacggcaaagaacttactgattcttgagtggccctgaagctgcactatgttggaggtttccttgactaagagaaccacatgcggcattcagctcagtaggggagtcataaaagatctcgcctctgaccagaagagtatgaatgacaaaggtgacataaccagcacagaaagatgtcttagcctctgcacatcagctgatttagaatacttatgtagatagcggttggggtcgggggggtgcggaatgttcttttcagcttctttgccctgagaactttgatcttattgcaaggaagtcccttaccctcttctaccctagatctgatggacctcctgggatttcctggggaaatgaaatgagtctaacacc

SEQ ID NO: 4460 - DNA, 2583 bp, Homo sapiens
  source 1..2583: mol_type = genomic DNA
gattggatgaggcaccactcctcgtggggctgcttaggccaccgcgcgcgctgcgcgctgggaaacgagtggagacacgaggaccagcgcgagcggtcccggtgggctaccctccccctgcgacgaccccccctcgctctgaccgactggtcccctaaacggtggcggcggtttttggtcgttgggccccgggatttaggaccaacatttgaagacccgaaggggaactgcaaccatgaatgaagaaaatatagatggaacaaatggatgcagtaaagttcgaactggtattcagaatgaagcagcattacttgctttgatggaaaagactggttacaacatggttcaggaaaatggacaaaggaaatttggcggtcctcctccaggttgggaaggtccacctccacctagaggctgtgaagtttttgtaggaaaaatacctcgtgatatgtatgaagatgagttagttcctgtatttgaaagagctgggaagatatatgaatttcgacttatgatggaatttagtggtgaaaatcgaggttatgcttttgtgatgtacactacaaaagaagaagcccaattagccatcagaattcttaataattatgaaattcgaccagggaagtttattggtgtgtgtgtaagcctggataattgtagattatttattggagctattcccaaggaaaagaagaaagaagaaattttagatgaaatgaagaaagttacagaaggagttgtagatgtcattgtttatccaagtgcaactgataagaccaaaaatcgtggttttgcatttgtggaatatgaatctcacagagctgctgctatggcaaggaggaaactaattccaggaacattccaactatggggccacaccattcaggtagattgggctgacccagagaaagaggtggatgaggaaaccatgcagagagttaaagttctttatgtaagaaatttaatgatctcaactacagaggaaacaattaaagcagaattcaataaatttaagcctggtgcagttgaacgggtaaagaaacttagagattatgcttttgttcactttttcaaccgagaagatgcagtggctgccatgtctgttatgaatggaaaatgcattgatggagcaagtattgaggtaacactagctaaaccagtaaataaagaaaacacttggagacagcatcttaatggtcagattagtccaaattctgaaaatctgattgtgtttgctaacaaagaagagagccacccaaaaactctaggcaagctgccaactcttcctgctcgtctcaatggtcagcatagcccaagtccgcctgaagttgaaagatgcacttaccctttttatcctggaacaaagcttactccaattagtatgtattctttaaaatccaatcattttaattctgcagtaatgcatttggattattactgcaacaaaaataactgggcaccaccagaatattatttatattcaacaacaagtcaagatgggaaagtactcttggtgtataagatagttattcctgctattgcaaatggatcccagagttacttcatgccagacaaactctgtactacgttagaagatgcaaaggaactggcagcccagtttacattacttcatttggactacaatttccatcgcagctcaataaatagtctttcccctgttagtgctaccctctcttctgggactcccagcgtgcttccttatacttcaaggccttattcttatccaggctatcctttgtcaccaacaatatcacttgctaatggcagccatgttggacagcggctatgtatctccaatcaggcctccttcttctgaagaaaatactaacattagtatgaaaatttgtgtaaatttgtagtatgaaaacttgcaaattaaaatattgttttattttagaatcgggtttgcatatttggttttaaaaaggtatttattccaaagtactaaacatcagctataattcagaataacatggagttgtagaatttataaaaatgcaaagtttaaaaagttattcagtggtttctcttgataaaggtacagcaaactactattctttttaaacttctaggattttcttctactttctgagtgggcaatagaacctagtcatttatgtttttttttttttttgcataattttactaaatagtatttcacaaatattaaagcacttgaagacaatggttatagtagatttgattaccaaggatcactatctgtactggagattagaacaattatatgaccagaagcatctaaccattatgtaaaaagaaatgatgagacaaaaagattaagatacaaattttgtgcagtactaaagaaaaagcagtctaccattgtggtccttgaaaataactatagatatttttgttatttgttagacacaaattataattttgttgttaatgtatttaagcattttatagttatgctttgtgtttttgatattctttgtattgttaataacaagtgttatgggtttttaatgttgaaatcatgtgttaatttttgtacttgaattcaaattttttgacattaaatatgtgatgcttcta

SEQ ID NO: 4461 - DNA, 4056 bp, Homo sapiens
  source 1..4056: mol_type = genomic DNA
agactagacgctgagcgctcccgtgcgcagcgccccacgcagccgggacgcggcgccgctctgcgggtggaaccgccgcgcgctcccggcctcgggagctgagcccgagagaacttcgctgccttcgggtcgccgctcccgctttccactgtggaatgtgcagcttgggatagagagaaaccagggtttggggagcggtcctcctggagactttctctctgcaagtctccaaggttaagcaattctgacccactggaattcccagagcctgggagttaagcctaaaacgctctgttgctttaagcggcgcggtggggagtcgctggacactccttattttggttttacattaaaaagaaggcggacgagaagatgttgtaggtgacttcctagctgtgttaagttgctcctgggctgtgaatggtgttaatttctgaagtgggcggctccaaaaacttaacaaggaaagctcaggtaacggaggccttggaaagagactctgcgtcaggtcacccagcagagatcagcaatccttggctcactgaggaggtttggatttgcctcaaagggcactgcaaaaattgaacagaggaatcccaaggaagctgcctgaatttgcctgtatactctcgttctgcgacttataaaggaccagacaaatcaaattagtggttttggtttccgccagctgtggatgcctttgacattatgaccgcagaggattccaccgcagccatgagcagtgactcggccgccgggtcctccgccaaggtgcccgagggcgtggcgggcgcgcccaacgaggcagcactgctggcgctgatggagcgcacgggctacagcatggtgcaagagaacgggcagcgcaagtacggcggcccaccgcccggctgggagggcccgcacccgcagcgtggctgcgaggtcttcgtgggcaagatcccgcgcgacgtgtacgaggacgagctggtgcccgtgttcgaggccgtgggccgcatctacgagctgcgcctcatgatggactttgacggcaagaaccgcggctacgccttcgtcatgtactgccacaagcacgaggccaagcgcgcagtgcgtgagctcaacaactacgagatccgcccgggccgcctgctcggcgtgtgctgcagcgtggacaactgccgcctcttcatcggcgggatccccaagatgaagaagcgcgaggaaatcctggaggagattgccaaggtcaccgagggcgtgctggacgtgatcgtctacgccagcgcggccgacaagatgaagaaccgcggcttcgccttcgtggagtacgagagccaccgcgcggctgccatggctcgccgcaagctcatgcctggccgcatccagctgtggggccaccagatcgccgtggactgggccgaacctgagatcgacgtggacgaggacgtgatggagaccgtgaagatcctctacgtgcgcaacctcatgatcgagaccaccgaggacaccatcaagaagagcttcggccagttcaaccccggctgcgtggagcgcgtcaagaagatccgcgactacgccttcgtgcacttcaccagccgcgaggatgccgtgcatgccatgaacaacctcaacggcactgagctggagggctcgtgcctggaggtcacgctggccaagcccgtggacaaggagcagtactcgcgctaccagaaggcagccaggggcggcggcgcggctgaggcagcgcagcagcccagctacgtgtactcctgcgacccctacacactggcctactacggctacccctacaacgcgctcattgggcccaacagggactactttgtgaaagcaggcagcataagaggccgagggcgaggtgcagctggcaacagagccccagggcctaggggttcctacctcgggggatattctgctggtcgtggtatatatagccgatatcatgaagggaaaggaaagcagcaagaaaaaggatatgaactggtgccgaatttggaaatccctaccgtcaacccagttgccattaaacctggtacagtagccatccctgccattggggctcagtattccatgtttccagcagctccagcccctaaaatgattgaagatggcaaaatccacacagtggagcacatgatcagccccattgctgtgcagccagacccagccagtgctgctgccgccgcagccgcggccgcagccgccgcagccgctgtcattcccactgtgtcgacgccaccacctttccagggccgcccaataactccagtatacacggtggctccaaacgttcagagaattcctactgccgggatctacggggccagttacgtgccatttgctgctccagctacagccacgatcgccacactacagaagaacgcggcagccgcggccgccatgtatggaggatacgcaggctacatacctcaggccttccctgctgctgccattcaggtccccatccccgacgtctaccagacatactgaggctggtgaccagcacgaagacagaccacacaaacaccactgaaggaacgcttgactatttatgaagaaggaacatgttggattcacacatgcaacctgaaagtgaagaatgttagcagatttatttctgaattattttatatacatgaagttttcactagttttttaagactattttcaacttagcatgcctacgttcatacatttccaaaagacttgcaatggttcgtgccttcattccatcttttaaaaatttgtatgctgtactacatttgtatagaggtttttgttgttgtttttttaaggatatattttcagtatgaaggttattttcttaacttctgcactccagagatttctattttgtagtaccttcaataatatatcaactatatattaaaaaagcacacttgaggagctagggaactattttgaaaaatatatacaatatttaaagatacaaacagtagtgcttaaaaatactacataaagcattattttaaaggttatactggaaagtgcaattttaaaatgagtaaaacctctgtatttctgctggcattaagggttgatggtgttaccatgtatcatcatggcggtactattttttaaaagaaattaaacactggatctctccttaagccaacattgaaaagacttgccgcacttctgagtccaaacactggaaagctctcctttgccaccgttagccggggctcattctccatgtgccttagccttaaacatgcccccactcccacatctctcaccctgtcccctcctccccagattcccaatcccaccgcaatgtttggcaagcctaggactgataagtagctctgatagaggagctggtggcttttatacttcttcctgggtttttgttggggtttgttgtttcgttgttttttgtttttttttttgtttggttggggaagtattgtcttctacgtgtgctattttcagtagcagagtaagcacaaggttttaatcgagttgcataagacacctttgcatagctatttaattgcccaatgtaaaactttaatgccatttctaatgcttttattcatttttgaagtatgagtttgtagggacaaagaatgtatgttatcgtagacaagacccccagagactcttttcagcagaaagttatgcttctagttgccttaccatgtttcttgcaaaactgtccatggtcctcaagggtgttggaaacattatgtttattaaatgggcctctcttcctttgctgtgcacttgatgggtgaactggattggggtgtgcacatccaggaggaggaggagagacctgtagaagtttaaagatagtttgtaaatatcttctaatgcttgtttttagtccttttatgttggagaagttcatggtatgtagtttaatgcaaaatgaaaccattttatttcaatgttattaaaaaggtttgttttattaggaagttaatgtattgttgcagtgttttgtgcctgtttaaaggcttttgtttagcagagtgaatgtaaaatacagtaaaatgttaagattgtcatctactttttaaaaaaaaa

SEQ ID NO: 4462 - DNA, 4816 bp, Homo sapiens
  source 1..4816: mol_type = genomic DNA
aaggggaagtgtggaaatagagcctgcttgttcattttcattattgtacattacatgatatcttttcgaccattatattgtgttccctcagtggtgtttgctctgagggtgggacacaagcctgtttagtgtctcgtaaaacatttaccaaaagcactgagccatggtttttgaagggcattccgttgccagagtgtgggaggagagagcaagcagggaaagagagcgccaggtgcttagcaggatttgcctcaaagggcactgcaaaaattgaacagaggaatcccaaggaagctgcctgaatttgcctgtatactctcgttctgcgacttataaaggaccagacaaatcaaattagtggttttggtttccgccagctgtggatgcctttgacattatgaccgcagaggattccaccgcagccatgagcagtgactcggccgccgggtcctccgccaaggtgcccgagggcgtggcgggcgcgcccaacgaggcagcactgctggcgctgatggagcgcacgggctacagcatggtgcaagagaacgggcagcgcaagtacggcggcccaccgcccggctgggagggcccgcacccgcagcgtggctgcgaggtcttcgtgggcaagatcccgcgcgacgtgtacgaggacgagctggtgcccgtgttcgaggccgtgggccgcatctacgagctgcgcctcatgatggactttgacggcaagaaccgcggctacgccttcgtcatgtactgccacaagcacgaggccaagcgcgcagtgcgtgagctcaacaactacgagatccgcccgggccgcctgctcggcgtgtgctgcagcgtggacaactgccgcctcttcatcggcgggatccccaagatgaagaagcgcgaggaaatcctggaggagattgccaaggtcaccgagggcgtgctggacgtgatcgtctacgccagcgcggccgacaagatgaagaaccgcggcttcgccttcgtggagtacgagagccaccgcgcggctgccatggctcgccgcaagctcatgcctggccgcatccagctgtggggccaccagatcgccgtggactgggccgaacctgagatcgacgtggacgaggacgtgatggagaccgtgaagatcctctacgtgcgcaacctcatgatcgagaccaccgaggacaccatcaagaagagcttcggccagttcaaccccggctgcgtggagcgcgtcaagaagatccgcgactacgccttcgtgcacttcaccagccgcgaggatgccgtgcatgccatgaacaacctcaacggcactgagctggagggctcgtgcctggaggtcacgctggccaagcccgtggacaaggagcagtactcgcgctaccagaaggcagccaggggcggcggcgcggctgaggcagcgcagcagcccagctacgtgtactcctgcgacccctacacactggcctactacggctacccctacaacgcgctcattgggcccaacagggactactttgtgaaagcaggcagcataagaggccgagggcgaggtgcagctggcaacagagccccagggcctaggggttcctacctcgggggatattctgctggtcgtggtatatatagccgatatcatgaagggaaaggaaagcagcaagaaaaaggatatgaactggtgccgaatttggaaatccctaccgtcaacccagttgccattaaacctggtacagtagccatccctgccattggggctcagtattccatgtttccagcagctccagcccctaaaatgattgaagatggcaaaatccacacagtggagcacatgatcagccccattgctgtgcagccagacccagccagtgctgctgccgccgcagccgcggccgcagccgccgcagccgctgtcattcccactgtgtcgacgccaccacctttccagggccgcccaataactccagtatacacggtggctccaaacgttcagagaattcctactgccgggatctacggggccagttacgtgccatttgctgctccagctacagccacgatcgccacactacagaagaacgcggcagccgcggccgccatgtatggaggatacgcaggctacatacctcaggccttccctgctgctgccattcaggtccccatccccgacgtctaccagacatactgaggctggtgaccagcacgaagacagaccacacaaacaccactgaaggaacgcttgactatttatgaagaaggaacatgttggattcacacatgcaacctgaaagtgaagaatgttagcagatttatttctgaattattttatatacatgaagttttcactagttttttaagactattttcaacttagcatgcctacgttcatacatttccaaaagacttgcaatggttcgtgccttcattccatcttttaaaaatttgtatgctgtactacatttgtatagaggtttttgttgttgtttttttaaggatatattttcagtatgaaggttattttcttaacttctgcactccagagatttctattttgtagtaccttcaataatatatcaactatatattaaaaaagcacacttgaggagctagggaactattttgaaaaatatatacaatatttaaagatacaaacagtagtgcttaaaaatactacataaagcattattttaaaggttatactggaaagtgcaattttaaaatgagtaaaacctctgtatttctgctggcattaagggttgatggtgttaccatgtatcatcatggcggtactattttttaaaagaaattaaacactggatctctccttaagccaacattgaaaagacttgccgcacttctgagtccaaacactggaaagctctcctttgccaccgttagccggggctcattctccatgtgccttagccttaaacatgcccccactcccacatctctcaccctgtcccctcctccccagattcccaatcccaccgcaatgtttggcaagcctaggactgataagtagctctgatagaggagctggtggcttttatacttcttcctgggtttttgttggggtttgttgtttcgttgttttttgtttttttttttgtttggttggggaagtattgtcttctacgtgtgctattttcagtagcagagtaagcacaaggttttaatcgagttgcataagacacctttgcatagctatttaattgcccaatgtaaaactttaatgccatttctaatgcttttattcatttttgaagtatgagtttgtagggacaaagaatgtatgttatcgtagacaagacccccagagactcttttcagcagaaagttatgcttctagttgccttaccatgtttcttgcaaaactgtccatggtcctcaagggtgttggaaacattatgtttattaaatgggcctctcttcctttgctgtgcacttgatgggtgaactggattggggtgtgcacatccaggaggaggaggagagacctgtagaagtttaaagatagtttgtaaatatcttctaatgcttgtttttagtccttttatgttggagaagttcatggtatgtagtttaatgcaaaatgaaaccattttatttcaatgttattaaaaaggtttgttttattaggaagttaatgtattgttgcagtgttttgtgcctgtttaaaggcttttgtttagcagagtgaatgtaaaatacagtaaaatgttaagattgtcatctactttttaaaaaaaaatatcaacttggaattgttttttaaaggctcaatcaaggaagtgaggtgtgcaataaggtagcaagtaaaacgcagttgcgtttttatgtcatgttagagatccatacaattttccactcacgggatttttgttgatggctgaattcttgtggattcataagaggatcatgcccttagcaagtacttttgttttgttttaaattaagagattcccaaatgcctttttccccctcatcttgaaatgagatgagtttttatgtgtaagcaatatttatttaactattctataaaattattgagtgcctactgaggcctttaagcaccgctaacattcctttccatcattcttttaaatgacataaaataattgtgcaatgttcctgatgatgtaccccacaagctgcattcaaactcaaatctgtgggaatgagtgactcgacaaaatgtaattcggatcagatcctcatcccctgactgtgtgaaaaaagtactctccttctagtgaaggattgtcacagagtttcactggatgaaactatgacccagtattcttactgtattttacatatgcctgtaaattatttgcaaaaaagaagaagaagaggaagaaagaaaagaaagaaaagaaagaaagaaagaaagaaagaaagaaagaaagaaagaaagaaagaaagaaagaaagaaaaagaaagaaagaataaaaaaaaatgataacatggcaaccaccaaactcccttaaaaacaaacattggtgacatggccaattaagtatcagtgagcctcctatctgggacttatctgttcctattgtttcaaaaccatttcatgtacactactgaggtaagtttataacttgaaatgtgaactttttttttttttagtgttaagaacaaactatataaatgtaaaaaaaaagttttagagttctgttttcaaacattgctagtggtttagttaactttagctgctttatatttgaaaagcttttatttagatcttgctccatttacagtacattcttaggatgtatgtagtaaataaagctttctttaaagcaatcgcaagacctta

SEQ ID NO: 4463 - DNA, 657 bp, Homo sapiens
  source 1..657: mol_type = genomic DNA
ataaacaggtaaggcggagggggtggggcgcggattgcggacatctgggtttcttgggaattgggatggggtgggggttcgagccaactccccagagagcaggcaaggtgaagcgagggcttggctgctgtttctaaatgcagtgtttttttgttccctttctagaaaccctccgtaactctaggtcagagcgcactaaaatgagccacttctgaacgagcagcgcccaggccccaggccctgctgcgaaggccccggcaaaggtcagggccccgtccgcgtgacgctcctgcctgcgcgcggccaagccatgctcggccccaggatttgcctcaaagggcactgcaaaaattgaacagaggaatcccaaggaagctgcctgaatttgcctgtatactctcgttctgcgacttataaaggaccagacaaatcaaattagtggttttggtttccgccagctgtggatgcctttgacattatgaccgcagaggattccaccgcagccatgagcagtgactcggccgccgggtcctccgccaaggtgcccgagggcgtggcgggcgcgcccaacgaggcagcactgctggcgctgatggagcgcacgggctacagcatggtgcaagagaacgggcagcgcaagtacggcggcccaccgcc

SEQ ID NO: 4464 - DNA, 1100 bp, Homo sapiens
  source 1..1100: mol_type = genomic DNA
taatttctccaacgtggttctggctgggtttctcggagcagcccgaagggggccgagcgtctgactcggacagatgcccccaggtggagcaggtgccacttctgggtgtctgaaaggcatgtgacttttggggcggggagagaagtccgtctggtcaagtcccccaatctctgccatcaaggccgattttctttgaaccttcagcaaagctcaggtaacggaggccttggaaagagactctgcgtcaggtcacccagcagagatcagcaatccttggctcactgaggaggtttggatttgcctcaaagggcactgcaaaaattgaacagaggaatcccaaggaagctgcctgaatttgcctgtatactctcgttctgcgacttataaaggaccagacaaatcaaattagtggttttggtttccgccagctgtggatgcctttgacattatgaccgcagaggattccaccgcagccatgagcagtgactcggccgccgggtcctccgccaaggtgcccgagggcgtggcgggcgcgcccaacgaggcagcactgctggcgctgatggagcgcacgggctacagcatggtgcaagagaacgggcagcgcaagtacggcggcccaccgcccggctgggagggcccgcacccgcagcgtggctgcgaggtcttcgtgggcaagatcccgcgcgacgtgtacgaggacgagctggtgcccgtgttcgaggccgtgggccgcatctacgagctgcgcctcatgatggactttgacggcaagaaccgcggctacgccttcgtcatgtactgccacaagcacgaggccaagcgcgcagtgcgtgagctcaacaactacgagatccgcccgggccgcctgctcggcgtgtgctgcagcgtggacaactgccgcctcttcatcggcgggatccccaagatgaagaagcgcgaggaaatcctggaggagattgccaaggtcaccgagggcgtgctggacgtgatcgtctacgccagcgcggccgacaagatgaagaaccgcggcttcgccttcgtggagtacgagagccaccgcgcggctgccatggctcgccgcaagctcatgcctggcc

SEQ ID NO: 4465 - DNA, 836 bp, Homo sapiens
  source 1..836: mol_type = genomic DNA
gtcacagaattcgattcctgttggcccattccgcgcctacaaacaggcttagcgctccactgaaatgcgggaggctccttaactcttgtataaacagaaaccctccgtaactctaggtcagagcgcactaaaatgagccacttctgaacgagcagcgcccaggccccaggccctgctgcgaaggccccggcaaaggtcagggccccgtccgcgtgacgctcctgcctgcgcgcggccaagccatgctcggccccagctcaggtaacggaggccttggaaagagactctgcgtcaggtcacccagcagagatcagcaatccttggctcactgaggaggtttggatttgcctcaaagggcactgcaaaaattgaacagaggaatcccaaggaagctgcctgaatttgcctgtatactctcgttctgcgacttataaaggaccagacaaatcaaattagtggttttggtttccgccagctgtggatgcctttgacattatgaccgcagaggattccaccgcagccatgagcagtgactcggccgccgggtcctccgccaaggtgcccgagggcgtggcgggcgcgcccaacgaggcagcactgctggcgctgatggagcgcacgggctacagcatggtgcaagagaacgggcagcgcaagtacggcggcccaccgcccggctgggagggcccgcacccgcagcgtggctgcgaggtcttcgtgggcaagatcccgcgcgacgtgtacgaggacgagctggtgcccgtgttcgaggccgtgggccgcatctacgagctgcgcctcatgatggactttgacggcaagaaccgcggctacgc

SEQ ID NO: 4466 - DNA, 882 bp, Homo sapiens
  source 1..882: mol_type = genomic DNA
gggaaagagagcgccaggtgcttagcaggatttgcctcaaagggcactgcaaaaattgaacagaggaatcccaaggaagctgcctgaatttgcctgtatactctcgttctgcgacttataaaggaccagacaaatcaaattagtggttttgagacagggtctcactatgttgcccagactggtctggaactcctgagctcaagcaagcttctcacctcagcctcccaaagtgctgggattataggcttcagccaccacgcccaaccagccaggtttccgccagctgtggatgcctttgacattatgaccgcagaggattccaccgcagccatgagcagtgactcggccgccgggtcctccgccaaggtgcccgagggcgtggcgggcgcgcccaacgaggcagcactgctggcgctgatggagcgcacgggctacagcatggtgcaagagaacgggcagcgcaagtacggcggcccaccgcccggctgggagggcccgcacccgcagcgtggctgcgaggtcttcgtgggcaagatcccgcgcgacgtgtacgaggacgagctggtgcccgtgttcgaggccgtgggccgcatctacgagctgcgcctcatgatggactttgacggcaagaaccgcggctacgccttcgtcatgtactgccacaagcacgaggccaagcgcgcagtgcgtgagctcaacaactacgagatccgcccgggccgcctgctcggcgtgtgctgcagcgtggacaactgccgcctcttcatcggcgggatccccaagatgaagaagcgcgaggaaatcctggaggagattgccaaggtcaccgagggcgtgctggacgtgatcgtctacgccagcgcggccgacaagatgaagaac

SEQ ID NO: 4467 - DNA, 856 bp, Homo sapiens
  source 1..856: mol_type = genomic DNA
ccgcgcctacaaacaggcttagcgctccactgaaatgcgggaggctccttaactcttgtataaacagaaaccctccgtaactctaggtcagagcgcactaaaatgagccacttctgaacgagcagcgcccaggccccaggccctgctgcgaaggccccggcaaaggtcagggccccgtccgcgtgacgctcctgcctgcgcgcggccaagccatgctcggccccaggatttgcctcaaagggcactgcaaaaattgaacagaggaatcccaaggaagctgcctgaatttgcctgtatactctcgttctgcgacttataaaggaccagacaaatcaaattagtggttttggtttccgccagctgtggatgcctttgacattatgaccgcagaggattccaccgcagccatgagcagtgactcggccgccgggtcctccgccaaggtgcccgagggcgtggcgggcgcgcccaacgaggcagcactgctggcgctgatggagcgcacgggctacagcatggtgcaagagaacgggcagcgcaagtacggcggcccaccgcccggctgggagggcccgcacccgcagcgtggctgcgaggtcttcgtgggcaagatcccgcgcgacgtgtacgaggacgagctggtgcccgtgttcgaggccgtgggccgcatctacgagctgcgcctcatgatggactttgacggcaagaaccgcggctacgccttcgtcatgtactgccacaagcacgaggccaagcgcgcagtgcgtgagctcaacaactacgagatccgcccgggccgcctgctcggcgtgtgctgcagcgtggacaactgccgcctcttcatcggcgggatccc

SEQ ID NO: 4468 - DNA, 797 bp, Homo sapiens
  source 1..797: mol_type = genomic DNA
tgaaccttcagcaaaggtatctgcgctcctaaaaaacaacaggaatgtggcactggcctttagccaggggaggctcagccagcaggataaaatttcagggcagatttacgggaagttgccggtgttgggagtaaaaatctggtttgctcaggtaacggaggccttggaaagagactctgcgtcaggtcacccagcagagatcagcaatccttggctcactgaggaggtttggatttgcctcaaagggcactgcaaaaattgaacagaggaatcccaaggaagctgcctgaatttgcctgtatactctcgttctgcgacttataaaggaccagacaaatcaaattagtggttttggtttccgccagctgtggatgcctttgacattatgaccgcagaggattccaccgcagccatgagcagtgactcggccgccgggtcctccgccaaggtgcccgagggcgtggcgggcgcgcccaacgaggcagcactgctggcgctgatggagcgcacgggctacagcatggtgcaagagaacgggcagcgcaagtacggcggcccaccgcccggctgggagggcccgcacccgcagcgtggctgcgaggtcttcgtgggcaagatcccgcgcgacgtgtacgaggacgagctggtgcccgtgttcgaggccgtgggccgcatctacgagctgcgcctcatgatggactttgacggcaagaaccgcggctacgccttcgtcatgtactgccacaagcacgaggccaagcgcgcagtgcgtgagctcaacaactacgagatccgcc

SEQ ID NO: 4469 - DNA, 4934 bp, Homo sapiens
  source 1..4934: mol_type = genomic DNA
gcagactagacgctgagcgctcccgtgcgcagcgccccacgcagccgggacgcggcgccgctctgcgggtggaaccgccgcgcgctcccggcctcgggagctgagcccgagagaacttcgctgccttcgggtcgccgctcccgctttccactgtggaatgtgcagcttgggatagagagaaaccagggtttggggagcggtcctcctggagactttctctctgcaagtctccaaggttaagcaattctgacccactggaattcccagagcctgggagttaagcctaaaacgctctgttgctttaagcggcgcggtggggagtcgctggacactccttattttggttttacattaaaaagaaggcggacgagaagatgttgtaggtgacttcctagctgtgttaagttgctcctgggctgtgaatggtgttaatttctgaagtgggcggctccaaaaacttaacaaggaaagctcaggtaacggaggccttggaaagagactctgcgtcaggtcacccagcagagatcagcaatccttggctcactgaggaggtttggatttgcctcaaagggcactgcaaaaattgaacagaggaatcccaaggaagctgcctgaatttgcctgtatactctcgttctgcgacttataaaggaccagacaaatcaaattagtggttttggtttccgccagctgtggatgcctttgacattatgaccgcagaggattccaccgcagccatgagcagtgactcggccgccgggtcctccgccaaggtgcccgagggcgtggcgggcgcgcccaacgaggcagcactgctggcgctgatggagcgcacgggctacagcatggtgcaagagaacgggcagcgcaagtacggcggcccaccgcccggctgggagggcccgcacccgcagcgtggctgcgaggtcttcgtgggcaagatcccgcgcgacgtgtacgaggacgagctggtgcccgtgttcgaggccgtgggccgcatctacgagctgcgcctcatgatggactttgacggcaagaaccgcggctacgccttcgtcatgtactgccacaagcacgaggccaagcgcgcagtgcgtgagctcaacaactacgagatccgcccgggccgcctgctcggcgtgtgctgcagcgtggacaactgccgcctcttcatcggcgggatccccaagatgaagaagcgcgaggaaatcctggaggagattgccaaggtcaccgagggcgtgctggacgtgatcgtctacgccagcgcggccgacaagatgaagaaccgcggcttcgccttcgtggagtacgagagccaccgcgcggctgccatggctcgccgcaagctcatgcctggccgcatccagctgtggggccaccagatcgccgtggactgggccgaacctgagatcgacgtggacgaggacgtgatggagaccgtgaagatcctctacgtgcgcaacctcatgatcgagaccaccgaggacaccatcaagaagagcttcggccagttcaaccccggctgcgtggagcgcgtcaagaagatccgcgactacgccttcgtgcacttcaccagccgcgaggatgccgtgcatgccatgaacaacctcaacggcactgagctggagggctcgtgcctggaggtcacgctggccaagcccgtggacaaggagcagtactcgcgctaccagaaggcagccaggggcggcggcgcggctgaggcagcgcagcagcccagctacgtgtactcctgcgacccctacacactggcctactacggctacccctacaacgcgctcattgggcccaacagggactactttgtgaaagtagccatccctgccattggggctcagtattccatgtttccagcagctccagcccctaaaatgattgaagatggcaaaatccacacagtggagcacatgatcagccccattgctgtgcagccagacccagccagtgctgctgccgccgcagccgcggccgcagccgccgcagccgctgtcattcccactgtgtcgacgccaccacctttccagggccgcccaataactccagtatacacggtggctccaaacgttcagagaattcctactgccgggatctacggggccagttacgtgccatttgctgctccagctacagccacgatcgccacactacagaagaacgcggcagccgcggccgccatgtatggaggatacgcaggctacatacctcaggccttccctgctgctgccattcaggtccccatccccgacgtctaccagacatactgaggctggtgaccagcacgaagacagaccacacaaacaccactgaaggaacgcttgactatttatgaagaaggaacatgttggattcacacatgcaacctgaaagtgaagaatgttagcagatttatttctgaattattttatatacatgaagttttcactagttttttaagactattttcaacttagcatgcctacgttcatacatttccaaaagacttgcaatggttcgtgccttcattccatcttttaaaaatttgtatgctgtactacatttgtatagaggtttttgttgttgtttttttaaggatatattttcagtatgaaggttattttcttaacttctgcactccagagatttctattttgtagtaccttcaataatatatcaactatatattaaaaaagcacacttgaggagctagggaactattttgaaaaatatatacaatatttaaagatacaaacagtagtgcttaaaaatactacataaagcattattttaaaggttatactggaaagtgcaattttaaaatgagtaaaacctctgtatttctgctggcattaagggttgatggtgttaccatgtatcatcatggcggtactattttttaaaagaaattaaacactggatctctccttaagccaacattgaaaagacttgccgcacttctgagtccaaacactggaaagctctcctttgccaccgttagccggggctcattctccatgtgccttagccttaaacatgcccccactcccacatctctcaccctgtcccctcctccccagattcccaatcccaccgcaatgtttggcaagcctaggactgataagtagctctgatagaggagctggtggcttttatacttcttcctgggtttttgttggggtttgttgtttcgttgttttttgtttttttttttgtttggttggggaagtattgtcttctacgtgtgctattttcagtagcagagtaagcacaaggttttaatcgagttgcataagacacctttgcatagctatttaattgcccaatgtaaaactttaatgccatttctaatgcttttattcatttttgaagtatgagtttgtagggacaaagaatgtatgttatcgtagacaagacccccagagactcttttcagcagaaagttatgcttctagttgccttaccatgtttcttgcaaaactgtccatggtcctcaagggtgttggaaacattatgtttattaaatgggcctctcttcctttgctgtgcacttgatgggtgaactggattggggtgtgcacatccaggaggaggaggagagacctgtagaagtttaaagatagtttgtaaatatcttctaatgcttgtttttagtccttttatgttggagaagttcatggtatgtagtttaatgcaaaatgaaaccattttatttcaatgttattaaaaaggtttgttttattaggaagttaatgtattgttgcagtgttttgtgcctgtttaaaggcttttgtttagcagagtgaatgtaaaatacagtaaaatgttaagattgtcatctactttttaaaaaaaaatatcaacttggaattgttttttaaaggctcaatcaaggaagtgaggtgtgcaataaggtagcaagtaaaacgcagttgcgtttttatgtcatgttagagatccatacaattttccactcacgggatttttgttgatggctgaattcttgtggattcataagaggatcatgcccttagcaagtacttttgttttgttttaaattaagagattcccaaatgcctttttccccctcatcttgaaatgagatgagtttttatgtgtaagcaatatttatttaactattctataaaattattgagtgcctactgaggcctttaagcaccgctaacattcctttccatcattcttttaaatgacataaaataattgtgcaatgttcctgatgatgtaccccacaagctgcattcaaactcaaatctgtgggaatgagtgactcgacaaaatgtaattcggatcagatcctcatcccctgactgtgtgaaaaaagtactctccttctagtgaaggattgtcacagagtttcactggatgaaactatgacccagtattcttactgtattttacatatgcctgtaaattatttgcaaaaaagaagaagaagaggaagaaagaaaagaaagaaaagaaagaaagaaagaaagaaagaaagaaagaaagaaagaaagaaagaaagaaagaaagaaaaagaaagaaagaataaaaaaaaatgataacatggcaaccaccaaactcccttaaaaacaaacattggtgacatggccaattaagtatcagtgagcctcctatctgggacttatctgttcctattgtttcaaaaccatttcatgtacactactgaggtaagtttataacttgaaatgtgaactttttttttttttagtgttaagaacaaactatataaatgtaaaaaaaaagttttagagttctgttttcaaacattgctagtggtttagttaactttagctgctttatatttgaaaagcttttatttagatcttgctccatttacagtacattcttaggatgtatgtagtaaataaagctttctttaaagcaatcgcaagaccttattttaaattgtg

SEQ ID NO: 4470 - DNA, 582 bp, Homo sapiens
  source 1..582: mol_type = genomic DNA
gcttaagcaaagctttcattacagttagcctgtcgcacccagatcaagattggaaaggatttgcctcaaagggcactgcaaaaattgaacagaggaatcccaaggaagctgcctgaatttgcctgtatactctcgttctgcgacttataaaggaccagacaaatcaaattagtggttttggtttccgccagctgtggatgcctttgacattatgaccgcagaggattccaccgcagccatgagcagtgactcggccgccgggtcctccgccaaggtgcccgagggcgtggcgggcgcgcccaacgaggcagcactgctggcgctgatggagcgcacgggctacagcatggtgcaagagaacgggcagcgcaagtacggcggcccaccgcccggctgggagggcccgcacccgcagcgtggctgcgaggtcttcgtgggcaagatcccgcgcgacgtgtacgaggacgagctggtgcccgtgttcgaggccgtgggccgcatctacgagctgcgcctcatgatggactttgacggcaagaaccgcggctacgccttcgtcatgtactgccacaagcacgaggc

SEQ ID NO: 4471 - DNA, 4473 bp, Homo sapiens
  source 1..4473: mol_type = genomic DNA
agtcagacccaggaggagtgaggtcaattgccctttagtcccaggactaaccggaagcttctgcaacaggaggacattgaaaataagatggaacccatccacataaggatttgcctcaaagggcactgcaaaaattgaacagaggaatcccaaggaagctgcctgaatttgcctgtatactctcgttctgcgacttataaaggaccagacaaatcaaattagtggttttggtttccgccagctgtggatgcctttgacattatgaccgcagaggattccaccgcagccatgagcagtgactcggccgccgggtcctccgccaaggtgcccgagggcgtggcgggcgcgcccaacgaggcagcactgctggcgctgatggagcgcacgggctacagcatggtgcaagagaacgggcagcgcaagtacggcggcccaccgcccggctgggagggcccgcacccgcagcgtggctgcgaggtcttcgtgggcaagatcccgcgcgacgtgtacgaggacgagctggtgcccgtgttcgaggccgtgggccgcatctacgagctgcgcctcatgatggactttgacggcaagaaccgcggctacgccttcgtcatgtactgccacaagcacgaggccaagcgcgcagtgcgtgagctcaacaactacgagatccgcccgggccgcctgctcggcgtgtgctgcagcgtggacaactgccgcctcttcatcggcgggatccccaagatgaagaagcgcgaggaaatcctggaggagattgccaaggtcaccgagggcgtgctggacgtgatcgtctacgccagcgcggccgacaagatgaagaaccgcggcttcgccttcgtggagtacgagagccaccgcgcggctgccatggctcgccgcaagctcatgcctggccgcatccagctgtggggccaccagatcgccgtggactgggccgaacctgagatcgacgtggacgaggacgtgatggagaccgtgaagatcctctacgtgcgcaacctcatgatcgagaccaccgaggacaccatcaagaagagcttcggccagttcaaccccggctgcgtggagcgcgtcaagaagatccgcgactacgccttcgtgcacttcaccagccgcgaggatgccgtgcatgccatgaacaacctcaacggcactgagctggagggctcgtgcctggaggtcacgctggccaagcccgtggacaaggagcagtactcgcgctaccagaaggcagccaggggcggcggcgcggctgaggcagcgcagcagcccagctacgtgtactcctgcgacccctacacactggcctactacggctacccctacaacgcgctcattgggcccaacagggactactttgtgaaagtagccatccctgccattggggctcagtattccatgtttccagcagctccagcccctaaaatgattgaagatggcaaaatccacacagtggagcacatgatcagccccattgctgtgcagccagacccagccagtgctgctgccgccgcagccgcggccgcagccgccgcagccgctgtcattcccactgtgtcgacgccaccacctttccagggccgcccaataactccagtatacacggtggctccaaacgttcagagaattcctactgccgggatctacggggccagttacgtgccatttgctgctccagctacagccacgatcgccacactacagaagaacgcggcagccgcggccgccatgtatggaggatacgcaggctacatacctcaggccttccctgctgctgccattcaggtccccatccccgacgtctaccagacatactgaggctggtgaccagcacgaagacagaccacacaaacaccactgaaggaacgcttgactatttatgaagaaggaacatgttggattcacacatgcaacctgaaagtgaagaatgttagcagatttatttctgaattattttatatacatgaagttttcactagttttttaagactattttcaacttagcatgcctacgttcatacatttccaaaagacttgcaatggttcgtgccttcattccatcttttaaaaatttgtatgctgtactacatttgtatagaggtttttgttgttgtttttttaaggatatattttcagtatgaaggttattttcttaacttctgcactccagagatttctattttgtagtaccttcaataatatatcaactatatattaaaaaagcacacttgaggagctagggaactattttgaaaaatatatacaatatttaaagatacaaacagtagtgcttaaaaatactacataaagcattattttaaaggttatactggaaagtgcaattttaaaatgagtaaaacctctgtatttctgctggcattaagggttgatggtgttaccatgtatcatcatggcggtactattttttaaaagaaattaaacactggatctctccttaagccaacattgaaaagacttgccgcacttctgagtccaaacactggaaagctctcctttgccaccgttagccggggctcattctccatgtgccttagccttaaacatgcccccactcccacatctctcaccctgtcccctcctccccagattcccaatcccaccgcaatgtttggcaagcctaggactgataagtagctctgatagaggagctggtggcttttatacttcttcctgggtttttgttggggtttgttgtttcgttgttttttgtttttttttttgtttggttggggaagtattgtcttctacgtgtgctattttcagtagcagagtaagcacaaggttttaatcgagttgcataagacacctttgcatagctatttaattgcccaatgtaaaactttaatgccatttctaatgcttttattcatttttgaagtatgagtttgtagggacaaagaatgtatgttatcgtagacaagacccccagagactcttttcagcagaaagttatgcttctagttgccttaccatgtttcttgcaaaactgtccatggtcctcaagggtgttggaaacattatgtttattaaatgggcctctcttcctttgctgtgcacttgatgggtgaactggattggggtgtgcacatccaggaggaggaggagagacctgtagaagtttaaagatagtttgtaaatatcttctaatgcttgtttttagtccttttatgttggagaagttcatggtatgtagtttaatgcaaaatgaaaccattttatttcaatgttattaaaaaggtttgttttattaggaagttaatgtattgttgcagtgttttgtgcctgtttaaaggcttttgtttagcagagtgaatgtaaaatacagtaaaatgttaagattgtcatctactttttaaaaaaaaatatcaacttggaattgttttttaaaggctcaatcaaggaagtgaggtgtgcaataaggtagcaagtaaaacgcagttgcgtttttatgtcatgttagagatccatacaattttccactcacgggatttttgttgatggctgaattcttgtggattcataagaggatcatgcccttagcaagtacttttgttttgttttaaattaagagattcccaaatgcctttttccccctcatcttgaaatgagatgagtttttatgtgtaagcaatatttatttaactattctataaaattattgagtgcctactgaggcctttaagcaccgctaacattcctttccatcattcttttaaatgacataaaataattgtgcaatgttcctgatgatgtaccccacaagctgcattcaaactcaaatctgtgggaatgagtgactcgacaaaatgtaattcggatcagatcctcatcccctgactgtgtgaaaaaagtactctccttctagtgaaggattgtcacagagtttcactggatgaaactatgacccagtattcttactgtattttacatatgcctgtaaattatttgcaaaaaagaagaagaagaggaagaaagaaaagaaagaaaagaaagaaagaaagaaagaaagaaagaaagaaagaaagaaagaaagaaagaaagaaagaaaaagaaagaaagaataaaaaaaaatgataacatggcaaccaccaaactcccttaaaaacaaacattggtgacatggccaattaagtatcagtgagcctcctatctgggacttatctgttcctattgtttcaaaaccatttcatgtacactactgaggtaagtttataacttgaaatgtgaactttttttttttttagtgttaagaacaaactatataaatgtaaaaaaaaagttttagagttctgttttcaaacattgctagtggtttagttaactttagctgctttatatttgaaaagcttttatttagatcttgctccatttacagtacattcttaggatgtatgtagtaaataaagctttctttaaagcaatcgcaagacctta

SEQ ID NO: 4472 - DNA, 741 bp, Homo sapiens
  source 1..741: mol_type = genomic DNA
ataaacaggtaaggcggagggggtggggcgcggattgcggacatctgggtttcttgggaattgggatggggtgggggttcgagccaactccccagagagcaggcaaggtgaagcgagggcttggctgctgtttctaaatgcagtgtttttttgttccctttctagaaaccctccgtaactctaggtcagagcgcactaaaatgagccacttctgaacgagcagcgcccaggccccaggccctgctgcgaaggccccggcaaaggtcagggccccgtccgcgtgacgctcctgcctgcgcgcggccaagccatgctcggccccagctcaggtaacggaggccttggaaagagactctgcgtcaggtcacccagcagagatcagcaatccttggctcactgaggaggtttggatttgcctcaaagggcactgcaaaaattgaacagaggaatcccaaggaagctgcctgaatttgcctgtatactctcgttctgcgacttataaaggaccagacaaatcaaattagtggttttggtttccgccagctgtggatgcctttgacattatgaccgcagaggattccaccgcagccatgagcagtgactcggccgccgggtcctccgccaaggtgcccgagggcgtggcgggcgcgcccaacgaggcagcactgctggcgctgatggagcgcacgggctacagcatggtgcaagagaacgggcagcgcaagtacggcggcccaccgc

SEQ ID NO: 4473 - DNA, 1714 bp, Homo sapiens
  source 1..1714: mol_type = genomic DNA
gggcggatgttgtcctccctgcgaggatcaaagtaggcaagatggcgtcgagcggcggggagctagggagtttatttgatcaccacgtccagagggcggtatgcgacacacgggccaaatatcgagagggacgacggcctcgtgctgtgaaggtatatacaatcaatttggaatctcagtacttattaatacaaggagttcctgctgtgggagtcatgaaggaattagttgagcgattcgctttatatggtgcaattgaacagtacaatgctctagatgaatacccagcagaagactttactgaagtttatcttattaaatttatgaacttacaaagtgcaaggacagccaagagaaaaatggatgaacagagtttcttctggattgcttcatgtgtgctatgctccagaatttgaaacagttgaagaaactagaaaaaaactacaaatgcggaaggcatatgtagtaaaaactactgaaaataaagaccattacgtgacaaagaagaaattggttacagagcataaagacacagaggattttagacaagacttccactcagagatgtctggattttgtaaagctgctttgaacacttctgcagggaactcaaatccttatcttccgtattcctgtgaattgcctttatgttatttctcctcaaaatgtatgtgttcatccgggggacctgtagacagagcaccagactcctctaaggatggtagaaaccatcataaaacaatggggcattataaccacaatgactctttgcggaaaacacagataaactctttgaaaaactcagtggcctgccctggtgcacaaaaggctattacgtcttcagaggcagttgacagatttatgcctaggacaacacaactgcaggagcgcaaaagaagaagagaagatgatcgtaaacttggaacttttcttcaaacaaacccaactggtaatgagattatgattggacctctgttaccagacatctctaaagtggatatgcacgatgactcattgaatacaacggcgaatttaattcggcataaacttaaagaggtaatttcatctgtgccaaagcctccagaggacaagccagaagatgtacatacaagtcatccattaaaacaaagaagaagaatatagagtgccagcagcaacttagtattttctaaaaagaacatttattatttatttttagcctgtcattttaattcttcaagagattttactgctggtattttttaatgcactcctctttgtaatttcattcaagccatttgtctaaagtcatttctttgttttttgggagatggagtcttgctctgttgcccaggctggaatgcagtggcgtgatctcggctcactgcaacctccacctcccgggttcaagcgattctcctgcctcagcctcctgagtatctgggattacaggcgtgcaccaccatgcctggctaagttttgtgttttttttagtagagatgggttttcaccatattggtcaggctggtctcgaactcctgaccttgtgatacacctgcctcagcctcccaaagggatgagccaccgcgcctggcccatttcttctttttttgacccatacttaatgttgcagaaactattcttgtcataacattatctctcatgtacagtaattatatgtaaattaattgaagcaaatatggaaactttacaatagaaataaagataggcagcc

SEQ ID NO: 4474 - DNA, 1236 bp, Homo sapiens
  source 1..1236: mol_type = genomic DNA
atggcgtcgagcggcggggagctagggagtttatttgatcaccacgtccagagggcggtatgcgacacacgggccaaatatcgagagggacgacggcctcgtgctgtgaaggtatatacaatcaatttggaatctcagtacttattaatacaaggagttcctgctgtgggagtcatgaaggaattagttgagcgattcgctttatatggtgcaattgaacagtacaatgctctagatgaatacccagcagaagactttactgaagtttatcttattaaatttatgaacttacaaagtgcaaggacagccaagagaaaaatggatgaacagagtttcttcggtggattgcttcatgtgtgctatgctccagaatttgaaacagttgaagaaactagaaaaaaactacaaatgcggaaggcatatgtagtaaaaactactgaaaataaagaccattacgtgacaaagaagaaattggttacagagcataaagacacagaggattttagacaagacttccactcagagatgtctggattttgtaaagctgctttgaacacttctgcagggaactcaaatccttatcttccgtattcctgtgaattgcctttatgttatttctcctcaaaatgtatgtgttcatccgggggacctgtagacagagcaccagactcctctaaggatggtagaaaccatcataaaacaatggggcattataaccacaatgactctttgcggaaaacacagataaactctttgaaaaactcagtggcctgccctggtgcacaaaaggctattacgtcttcagaggcagttgacagatttatgcctaggacaacacaactgcaggagcgcaaaagaagaagagaagatgatcgtaaacttggaacttttcttcaaacaaacccaactggtaatgagattatgattggacctctgttaccagacatctctaaagtggatatgcacgatgactcattgaatacaacggcgaatttaattcggcataaacttaaagaggtatttcatctgtgccaaagcctccagaggacaagccagaagatgtacatacaagtcatccattaaaacaaagaagaagaatatagagtgccagcagcaacttagtattttctaaaaagaacatttattatttatttttagcctgtcattttaattcttcaagagattttactgctggtattttttaatgcactcctctttgtaatttcattcaagcca

SEQ ID NO: 4475 - DNA, 1742 bp, Homo sapiens
  source 1..1742: mol_type = genomic DNA
gggcggatgttgtcctccctgcgaggatcaaagtaggcaagatggcgtcgagcggcggggagctagggagtttatttgatcaccacgtccagagggcggtatgcgacacacgggccaaatatcgagagggacgacggcctcgtgctgtgaaggtatatacaatcaatttggaatctcagtacttattaatacaaggagttcctgctgtgggagtcatgaaggaattagttgagcgattcgctttatatggtgcaattgaacagtacaatgctctagatgaatacccagcagaagactttactgaagtttatcttattaaatttatgaacttacaaagtgcaaggacagccaagagaaaaatggatgaacagagtttcttcggtggattgcttcatgtgtgctatgctccagaatttgaaacagttgaagaaactagaaaaaaactacaaatgcggaaggcatatgtagtaaaaactactgaaaataaagaccattacgtgacaaagaagaaattggttacagagcataaagacacagaggattttagacaagacttccactcagagatgtctggattttgtaaagctgctttgaacacttctgcagggaactcaaatccttatcttccgtattcctgtgaattgcctttatgttatttctcctcaaaatgtatgtgttcatccgggggacctgtagacagagcaccagactcctctaaggatggtagaaaccatcataaaacaatggggcattataaccacaatgactctttgcggaaaacacagataaactctttgaaaaactcagtggcctgccctggtgcacaaaaggctattacgtcttcagaggcagttgacagatttatgcctaggacaacacaactgcaggagcgcaaaagaagaagagaagatgatcgtaaacttggaacttttcttcaaacaaacccaactggtaatgagattatgattggacctctgttaccagacatctctaaagtggatatgcacgatgactcattgaatacaacggcgaatttaattcggcataaacttaaagaggtaatttcatctgtgccaaagcctccagaggacaagccagaagatgtacatacaagtcatccattaaaacaaagaagaagaatatagagtgccagcagcaacttagtattttctaaaaagaacatttattatttatttttagcctgtcattttaattcttcaagagattttactgctggtattttttaatgcactcctctttgtaatttcattcaagccatttgtctaaagtcatttctttgttttttgggagatggagtcttgctctgttgcccaggctggaatgcagtggcgtgatctcggctcactgcaacctccacctcccgggttcaagcgattctcctgcctcagcctcctgagtatctgggattacaggcgtgcaccaccatgcctggctaagttttgtgttttttttagtagagatgggttttcaccatattggtcaggctggtctcgaactcctgaccttgtgatacacctgcctcagcctcccaaagggatgagccaccgcgcctggcccatttcttctttttttgacccatacttaatgttgcagaaactattcttgtcataacattatctctcatgtacagtaattatatgtaaattaattgaagcaaatatggaaactttacaatagaaataaagataggcagccagcgtctgtttccaattataatacaa

SEQ ID NO: 4476 - DNA, 2339 bp, Homo sapiens
  source 1..2339: mol_type = genomic DNA
gtgtgtgtgatgtggggagctcgggggcgggtcgggccgggcctccggcagactgcacggcccggatttgggtttctcattttgcagcgggaggtctgggaagacaacgggaggaggcggggccgggtctccggaaggaggcggggcaggggtcgggtcgagtctttgttggggcgaagaagctggagggtgggccgctgggggcgaggtggttggtccccggtttgggggaaaggggacttttttctttttagagtatcttgaaaggcgctagtgcgcgcaggagaggtacacagatttccctccaaaaccttgttaccaggcgcactgcgattgatgccccttgcctttgcttgggcttttctcttccctcattttaagacatgaagcagctaattctggtatttcattgcgctccacttcacggagatgatagactgggctatgcatgctgaccctcgacctcctgtttgcatgtcacgcatagctcgcacttctcgagaacaaaccgcccttcttctattgaggaagaataatgaatgtctgtacgagggtcttgaaggtgcaagaactttggaggattagacgaaaatgctgcagtgcaccgaaatttcccaccacacccctgacttttgaagtcttgtgtttctctcccaggctcttgtcaggatggtgaagctgttcatcggaaaccttccccgggaggctacagagcaggagattcgctcactcttcgagcagtatgggaaggtgctggaatgtgacatcattaagaattacggctttgtgcacatagaagacaagacggcagctgaggatgccatacgcaacctgcaccattacaagcttcatggggtgaacatcaacgtggaagccagcaagaataagagcaaagcttcaaccaagttacacgtgggtaacatcagccccacttgtaccaaccaagagcttcgagccaagtttgaggagtatggtccggtcatcgaatgtgacatcgtgaaagattatgccttcgtacacatggagcgggcagaggatgcagtggaggccatcaggggccttgacaacacagagtttcaaggcaaaagaatgcatgtgcagttgtccacaagccggcttcggactgcccctggtatgggagaccagagtggctgctatcggtgtgggaaagaagggcactggtccaaagagtgcccagtagatcgtacgggtcgtgtggcagactttactgagcagtataatgaacaatatggagcagttcgaacaccttacaccatgggctacggggaatccatgtattacaacgatgcatatggagcactcgactactataagcgataccgggtccgctcttatgaggcagtagcagcggcggcagcggcttctgcatacaactacgcagagcagaccatgtcccatctgcctcaagtccaaagcacaactgtgaccagccacctcaactctacttctgttgatccctatgacagacacctattgccaaactctggcgctgctgccacttcagctgctatggctgctgctgcagccaccacttcctcctactatggaagggacaggagcccactgcgtcgtgctgcagccatgctccccacagttggagagggctacggttatgggccagagagtgaattatctcaggcttccgcagctacacggaattctctgtatgacatggcccggtatgaacgggagcagtatgtggaccgagcccggtactcagccttttaaaaactggaggtaggataattgcggactgaaccctcgggctgcggtcatatatgagaacttgctccgcgcggtcccctttgccgggatgtttccattgcttcatgtttcagtaaacaaaaggagtttgtgaccaactatgttttctttcttaattcttctaagttgacttttctttcctcctgaaactagtctctgtagcctttcactctgttccttatattctcagcctctgagcagccctaggtaaggattatgctggcatcccctttttcctgtgcagtggaacccctcttatcttgctttccctaggagttgaatccttctccctgcctacctgcagcatctcctttccctttaaaatgaccatgtagtggcaagcagccttttactcttctgttagctctggactcttaacacttaagttactcttctgaaattgctaggaccattgggggttttgttgttttgtttgttttttatgtccgacctgtgatcgtggtacagcattagctgaaatttacccttgttttactccactcctcccttttttaaaaaaattttttgacaaataaatgtttctaacacttaaa

SEQ ID NO: 4477 - DNA, 1840 bp, Homo sapiens
  source 1..1840: mol_type = genomic DNA
ggctcccgcgaggggaaggggagggaagcagcgcgcactcgcgcgtgcgtgagctggcgcgcgagaaagggcccggtcgcgtccaggctcgagcggccgtcgccattttgtaaggttctctctgacgtgggagccgccgtcgctgccgccacccggaggctcttgtcaggatggtgaagctgttcatcggaaaccttccccgggaggctacagagcaggagattcgctcactcttcgagcagtatgggaaggtgctggaatgtgacatcattaagaattacggctttgtgcacatagaagacaagacggcagctgaggatgccatacgcaacctgcaccattacaagcttcatggggtgaacatcaacgtggaagccagcaagaataagagcaaagcttcaaccaagttacacgtgggtaacatcagccccacttgtaccaaccaagagcttcgagccaagtttgaggagtatggtccggtcatcgaatgtgacatcgtgaaagattatgccttcgtacacatggagcgggcagaggatgcagtggaggccatcaggggccttgacaacacagagtttcaaggcaaaagaatgcatgtgcagttgtccacaagccggcttcggactgcccctggtatgggagaccagagtggctgctatcggtgtgggaaagaagggcactggtccaaagagtgcccagtagatcgtacgggtcgtgtggcagactttactgagcagtataatgaacaatatggagcagttcgaacaccttacaccatgggctacggggaatccatgtattacaacgatgcatatggagcactcgactactataagcgataccgggtccgctcttatgaggcagtagcagcggcggcagcggcttctgcatacaactacgcagagcagaccatgtcccatctgcctcaagtccaaagcacaactgtgaccagccacctcaactctacttctgttgatccctatgacagacacctattgccaaactctggcgctgctgccacttcagctgctatggctgctgctgcagccaccacttcctcctactatggaagggacaggagcccactgcgtcgtgctgcagccatgctccccacagttggagagggctacggttatgggccagagagtgaattatctcaggcttccgcagctacacggaattctctgtatgacatggcccggtatgaacgggagcagtatgtggaccgagcccggtactcagccttttaaaaactggaggtaggataattgcggactgaaccctcgggctgcggtcatatatgagaacttgctccgcgcggtcccctttgccgggatgtttccattgcttcatgtttcagtaaacaaaaggagtttgtgaccaactatgttttctttcttaattcttctaagttgacttttctttcctcctgaaactagtctctgtagcctttcactctgttccttatattctcagcctctgagcagccctaggtaaggattatgctggcatcccctttttcctgtgcagtggaacccctcttatcttgctttccctaggagttgaatccttctccctgcctacctgcagcatctcctttccctttaaaatgaccatgtagtggcaagcagccttttactcttctgttagctctggactcttaacacttaagttactcttctgaaattgctaggaccattgggggttttgttgttttgtttgttttttatgtccgacctgtgatcgtggtacagcattagctgaaatttacccttgttttactccactcctcccttttttaaaaaaattttttgacaaataaatgtttctaacacttaaa

SEQ ID NO: 4478 - DNA, 2716 bp, Homo sapiens
  source 1..2716: mol_type = genomic DNA
actgtgggtaggagacggccgtcggcggaggcgccattttgtgtagccgccgaaccttgttggaggttctggggcgcagaaccgctactgctgcttcggtctctccttgggaaaaaataaaatttgaaccttttggagctgtgtgctaaatcttcagtgggacaatgggttcagacaaaagagtgagtagaacagagcgtagtggaagatacggttccatcatagacagggatgaccgtgatgagcgtgaatcccgaagcaggcggagggactcagattacaaaagatctagtgatgatcggaggggtgatagatatgatgactaccgagactatgacagtccagagagagagcgtgaaagaaggaacagtgaccgatccgaagatggctaccattcagatggtgactatggtgagcacgactataggcatgacatcagtgacgagagggagagcaagaccatcatgctgcgcggccttcccatcaccatcacagagagcgatattcgagaaatgatggagtccttcgaaggccctcagcctgcggatgtgaggctgatgaagaggaaaacaggtgagagcttgcttagttcctgatattattgttctcttccccattcccacctcagtccctaaagaacatcctgattcccccagtcttcaagcacatgaattcagaatgaaaggtttgccatggctaaggaatgtgactctttgaaaaccatgttagcatctgaggaacttttttaaactttgttttagggacttttttttccttaggtaagtaatgatttataaactcctttttttttttgactatagtcggttgcatggttactttaagcgtggaatcaaatggagtggcatttagttcaggcggcttgttccttgccatggcaaagtatcaagaagatccccaagtcaagtcacatttgtaaagctgcttcccaattggctttgtcacgcagtgttgaagcagtgggagagagattcacctgttataaaggaactgactaacacaagtatcccgtctatatctgaatgctgtctctaggtgtaagccgtggtttcgccttcgtggagttttatcacttgcaagatgctaccagctggatggaagccaatcaggttgcttcactcaccaagtctagatattcatgaaaatggaacaagtctgtacaattttaaaaaaaggttgaaggagtggtttgttccaaaggagtgacttttttttaaaaaaaaagctttgtatatattaaaattgatgttactagaataagtacagtaccaaggacttcattatagaatttgttctgcctttaaacatggctacctacctggcagggctttgttaactactgaatacctgtctggtaatcactaaaacatcttaatgtttcccttttttctagtttgttatattcctattatgtccattgagagtaagcttagtatatcaaactctccatttgacagtgaagagaacatagtgaaagtctgtggcggcatttttataagtaattccttatttctgcctgaagaccacaaagcctcctggaggcgtaactgctcagaccggtcttcagggaatatttaaggacttagtggaatttatgaacaataagtctgatgagattagcctgggagtggtgtcctgcagctgtctaatctagttagagtggcattaacattctaatctccttgagaatgccttttatagtctgttcaaagcaagtcattgatggttcttcgaggtagtgttaactgaagtgttcttcagtttgtcaagataatgttcagtgcttggcacttaaataacattttttgcaagaactccaaggcacattattgaatgcctttaaccaagtgcattctgggaagtttgcttgactcattatcttgcttttctgcagcattctgtgatttgagtcatccatgaatccatgaataaaagttacattctttgattggtaatattgccatttataacaagactcactaatgagggtatcactttgactgactgatttgttaaagtttttaagcctctcattttcctaacccagaaatcacagcctgattttattaaaagtagagcttcattcatttcataccatagataccatcctagtaaatccagaacatatacaaggttcatgtgagtctgctttcttgacatgatagcattgtttgatgcagtggatatgtcagaatgactaacctaggagtttaaaactcctaagaaactaaaacctgtaagacatttaaaagtctccacaattttaatgtatacaaagctatgttactgtgtaacacattacagttcaaattcactccagaaataaaaggccagtaggattagggactcactggtagtttggagtctcccagcacacatccctcctagtgggatgatctattcacatatctcccagcttttttatttttgcttctgtatatcacagtgagtggatggcccttcagctttttctctcctggccagacatgcagtcttgcctttagatatcgcagagacaaaattcacagcatgtcttaaatcttccaggatttgcaagaaccaaattgctcaacagtatgtatgtttagaggggttagactcctttttaaaatctggatatctaaccacctacttaaatctgtttgatagtgtcaaaccacccccacccttgatcctcccacccccaagaaaaagaaaa

SEQ ID NO: 4479 - DNA, 3188 bp, Homo sapiens
  source 1..3188: mol_type = genomic DNA
aagcgtgaggtactgtgggtaggagacggccgtcggcggaggcgccattttgtgtagccgccgaaccttgttggaggttctggggcgcagaaccgctactgctgcttcggtctctccttgggaaaaaataaaatttgaaccttttggagctgtgtgctaaatcttcagtgggacaatgggttcagacaaaagagtgagtagaacagagcgtagtggaagatacggttccatcatagacagggatgaccgtgatgagcgtgaatcccgaagcaggcggagggactcagattacaaaagatctagtgatgatcggaggggtgatagatatgatgactaccgagactatgacagtccagagagagagcgtgaaagaaggaacagtgaccgatccgaagatggctaccattcagatggtgactatggtgagcacgactataggcatgacatcagtgacgagagggagagcaagaccatcatgctgcgcggccttcccatcaccatcacagagagcgatattcgagaaatgatggagtccttcgaaggccctcagcctgcggatgtgaggctgatgaagaggaaaacaggtgtaagccgtggtttcgccttcgtggagttttatcacttgcaagatgctaccagctggatggaagccaatcagaaaaagttggtgattcaaggaaagcacattgcaatgcattatagcaatcccagacctaagtttgaagattggctttgtaacaagtgctgccttaacaatttcaggaaaagactaaaatgcttccgatgtggagcagacaagtttgactctgaacaggaagtgcctcctggaaccacagagtcggttcagtctgtggattactactgtgatacgatcattcttcggaacatagctccgcacactgtggtggattccatcatgacagcactgtctccttacgcgtctttagctgtcaataacatccgcctcataaaagacaaacagacccagcagaacagaggcttcgcatttgtgcagctgtcctctgcaatggatgcttctcagctgcttcagatattacagagtctccatcctcctttgaaaattgatggcaaaactattggggttgattttgcaaaaagtgccagaaaagacttggtcctctcagatggtaaccgcgtcagcgctttctctgtagctagtacggctattgctgctgctcagtggtcatccacccagtctcaaagtggtgaaggaggcagtgttgactacagttatctgcaaccaggtcaagatggctatgcccaatatgctcagtattcacaggattatcagcagttttatcaacaacaagctggaggattggaatctgatgcatcatctgcatcaggcacagcagtgaccaccacctcagcggctgtagtgtcccagagtcctcagctgtataatcaaacctccaatccacctggctctccgactgaggaagcacagcctagcactagcacaagtacacaggccccagccgcttcccctactggtgtagttcctggtaccaaatatgcagtacctgacacgtccacttaccagtatgatgaatcttcaggatattactatgatccgacaacagggctctattatgaccccaactcgcaatactactataattccttgacccagcagtacctttactgggatggggaaaaagagacctacgtgccagctgcagagtctagctcccaccagcagtcgggcctgcctcctgcaaaagaggggaaagagaagaaggagaaacccaagagcaaaacagcccagcagattgccaaagacatggaacgctgggctaagagtttgaataagcagaaagaaaactttaaaaatagctttcagcctgtcaattccttgagggaagaagaaaggagagaatctgctgcagcagacgctggctttgctctctttgagaagaagggagccttagctgaaaggcagcagctcatcccagaattggtgcgaaatggagatgaggagaatcccctcaaaaggggtctggttgctgcttacagtggtgacagtgacaatgaggaggagctggtggagagacttgagagtgaggaagagaagctagctgactggaagaagatggcctgtctgctctgccggcgccagttcccgaacaaagatgccctagtcaggcaccagcaactctcagaccttcacaagcaaaacatggacatctatcgacgatccaggctgagcgagcaggagctggaagccttggagctaagggagagagagatgaaataccgagaccgagctgcagaaagacgggagaagtacggcattccagaacctccagagcccaagcgcaagaagcagtttgatgccggcactgtgaattacgagcaacccaccaaagatggcattgaccacagtaacattggcaacaagatgctgcaggccatgggctggcgggaaggctctggcttgggacgaaagtgtcaaggcattacggctcccattgaggctcaagttcggctaaagggagctggcctaggagccaaaggcagcgcatatggtttgtcgggcgccgattcctacaaagatgctgtccggaaagccatgtttgcccggttcactgagatggagtgagagagagagagagagagagatgacaaggagcacaagaagtggtccatctcccgaattcgctgttaccgcctgtctctttaagggcatgccttgtgctgttaatagatcttagggtgaaccacttcattctgcagggttctccctcccaccttaaagaagttccccttatgtgggttgcctggtgaatggccttccttcccgccagagggcttgtgaacagaccggagaggacagtggattgtttatactccagtgtacatagtgtaatgtagcgtgtttacatgtgtagcctatgttgtggtccatcagcccctcacattcctaggggtttgagatgctgtaggtggtatgtgacaccaaagccacctctgtcatttgttgtgatgtcttttcttggcaaaagccttgtgtatatttgtatattacacatttgtacagaattttggaagattttcagtctagttgccaaatctggctcctttacaaaagaaataccttgagaaatgggtgtcctgtgtctctttattcttgggtgggtaggtgggtcaagcatgtctgagccagt

SEQ ID NO: 4480 - DNA, 569 bp, Homo sapiens
  source 1..569: mol_type = genomic DNA
attttgtgtagccgccgaaccttgttggaggttctggggcgcagaaccgctactgctgcttcggtctctccttggggtaagtgcggcggctgtctgtaacgacgaaaaaataaaatttgaaccttttggagctgtgtgctaaatcttcagtgggacaatgggttcagacaaaagagtgagtagaacagagcgtagtggaagatacggttccatcatagacagggatgaccgtgatgagcgtgaatcccgaagcaggcggagggactcagattacaaaagatctagtgatgatcggaggggtgatagatatgatgactaccgagactatgacagtccagagagagagcgtgaaagaaggaacagtgaccgatccgaagatggctaccattcagatggtgactatggtgagcacgactataggcatgacatcagtgacgagagggagagcaagaccatcatgctgcgcggccttcccatcaccatcacagagagcgatattcgagaaatgatggagtccttcgaaggccctcagcctgcggatgtgaggctgatgaagaggaaaacaggtg

SEQ ID NO: 4481 - DNA, 2944 bp, Homo sapiens
  source 1..2944: mol_type = genomic DNA
ggtacaaaatgcagagtgagtagaacagagcgtagtggaagatacggttccatcatagacagggatgaccgtgatgagcgtgaatcccgaagcaggcggagggactcagattacaaaagatctagtgatgatcggaggggtgatagatatgatgactaccgagactatgacagtccagagagagagcgtgaaagaaggaacagtgaccgatccgaagatggctaccattcagatggtgactatggtgagcacgactataggcatgacatcagtgacgagagggagagcaagaccatcatgctgcgcggccttcccatcaccatcacagagagcgatattcgagaaatgatggagtccttcgaaggccctcagcctgcggatgtgaggctgatgaagaggaaaacaggtgtaagccgtggtttcgccttcgtggagttttatcacttgcaagatgctaccagctggatggaagccaatcagaaaaagttggtgattcaaggaaagcacattgcaatgcattatagcaatcccagacctaagtttgaagattggctttgtaacaagtgctgccttaacaatttcaggaaaagactaaaatgcttccgatgtggagcagacaagtttgactctgaacaggaagtgcctcctggaaccacagagtcggttcagtctgtggattactactgtgatacgatcattcttcggaacatagctccgcacactgtggtggattccatcatgacagcactgtctccttacgcgtctttagctgtcaataacatccgcctcataaaagacaaacagacccagcagaacagaggcttcgcatttgtgcagctgtcctctgcaatggatgcttctcagctgcttcagatattacagagtctccatcctcctttgaaaattgatggcaaaactattggggttgattttgcaaaaagtgccagaaaagacttggtcctctcagatggtaaccgcgtcagcgctttctctgtagctagtacggctattgctgctgctcagtggtcatccacccagtctcaaagtggtgaaggaggcagtgttgactacagttatctgcaaccaggtcaagatggctatgcccaatatgctcagtattcacaggattatcagcagttttatcaacaacaagctggaggattggaatctgatgcatcatctgcatcaggcacagcagtgaccaccacctcagcggctgtagtgtcccagagtcctcagctgtataatcaaacctccaatccacctggctctccgactgaggaagcacagcctagcactagcacaagtacacaggccccagccgcttcccctactggtgtagttcctggtaccaaatatgcagtacctgacacgtccacttaccagtatgatgaatcttcaggatattactatgatccgacaacagggctctattatgaccccaactcgcaatactactataattccttgacccagcagtacctttactgggatggggaaaaagagacctacgtgccagctgcagagtctagctcccaccagcagtcgggcctgcctcctgcaaaagaggggaaagagaagaaggagaaacccaagagcaaaacagcccagcagattgccaaagacatggaacgctgggctaagagtttgaataagcagaaagaaaactttaaaaatagctttcagcctgtcaattccttgagggaagaagaaaggagagaatctgctgcagcagacgctggctttgctctctttgagaagaagggagccttagctgaaaggcagcagctcatcccagaattggtgcgaaatggagatgaggagaatcccctcaaaaggggtctggttgctgcttacagtggtgacagtgacaatgaggaggagctggtggagagacttgagagtgaggaagagaagctagctgactggaagaagatggcctgtctgctctgccggcgccagttcccgaacaaagatgccctagtcaggcaccagcaactctcagaccttcacaagcaaaacatggacatctatcgacgatccaggctgagcgagcaggagctggaagccttggagctaagggagagagagatgaaataccgagaccgagctgcagaaagacgggagaagtacggcattccagaacctccagagcccaagcgcaagaagcagtttgatgccggcactgtgaattacgagcaacccaccaaagatggcattgaccacagtaacattggcaacaagatgctgcaggccatgggctggcgggaaggctctggcttgggacgaaagtgtcaaggcattacggctcccattgaggctcaagttcggctaaagggagctggcctaggagccaaaggcagcgcatatggtttgtcgggcgccgattcctacaaagatgctgtccggaaagccatgtttgcccggttcactgagatggagtgagagagagagagagagagagatgacaaggagcacaagaagtggtccatctcccgaattcgctgttaccgcctgtctctttaagggcatgccttgtgctgttaatagatcttagggtgaaccacttcattctgcagggttctccctcccaccttaaagaagttccccttatgtgggttgcctggtgaatggccttccttcccgccagagggcttgtgaacagaccggagaggacagtggattgtttatactccagtgtacatagtgtaatgtagcgtgtttacatgtgtagcctatgttgtggtccatcagcccctcacattcctaggggtttgagatgctgtaggtggtatgtgacaccaaagccacctctgtcatttgttgtgatgtcttttcttggcaaaagccttgtgtatatttgtatattacacatttgtacagaattttggaagattttcagtctagttgccaaatctggctcctttacaaaagaaataccttg

SEQ ID NO: 4482 - DNA, 2949 bp, Homo sapiens
  source 1..2949: mol_type = genomic DNA
ggccgtcggcggaggcgccattttgtgtagccgccgaaccttgttggaggttctggggcgcagaaccgctactgctgcttcggtctctccttgggaaaaaataaaatttgaaccttttggagctgtgtgctaaatcttcagtgggacaatgggttcagacaaaagagtgagtagaacagagcgtagtggaagatacggttccatcatagacagggatgaccgtgatgagcgtgaatcccgaagcaggcggagggactcagattacaaaagatctagtgatgatcggaggggtgatagatatgatgactaccgagactatgacagtccagagaatgataaatattcgagaaatgatggagtccttcgaaggccctcagcctgcggatgtgaggctgatgaagaggaaaacaggtgtaagccgtggtttcgccttcgtggagttttatcacttgcaagatgctaccagctggatggaagccaatcagaaaaagttggtgattcaaggaaagcacattgcaatgcattatagcaatcccagacctaagtttgaagattggctttgtaacaagtgctgccttaacaatttcaggaaaagactaaaatgcttccgatgtggagcagacaagtttgactctgaacaggaagtgcctcctggaaccacagagtcggttcagtctgtggattactactgtgatacgatcattcttcggaacatagctccgcacactgtggtggattccatcatgacagcactgtctccttacgcgtctttagctgtcaataacatccgcctcataaaagacaaacagacccagcagaacagaggcttcgcatttgtgcagctgtcctctgcaatggatgcttctcagctgcttcagatattacagagtctccatcctcctttgaaaattgatggcaaaactattggggttgattttgcaaaaagtgccagaaaagacttggtcctctcagatggtaaccgcgtcagcgctttctctgtagctagtacggctattgctgctgctcagtggtcatccacccagtctcaaagtggtgaaggaggcagtgttgactacagttatctgcaaccaggtcaagatggctatgcccaatatgctcagtattcacaggattatcagcagttttatcaacaacaagctggaggattggaatctgatgcatcatctgcatcaggcacagcagtgaccaccacctcagcggctgtagtgtcccagagtcctcagctgtataatcaaacctccaatccacctggctctccgactgaggaagcacagcctagcactagcacaagtacacaggccccagccgcttcccctactggtgtagttcctggtaccaaatatgcagtacctgacacgtccacttaccagtatgatgaatcttcaggatattactatgatccgacaacagggctctattatgaccccaactcgcaatactactataattccttgacccagcagtacctttactgggatggggaaaaagagacctacgtgccagctgcagagtctagctcccaccagcagtcgggcctgcctcctgcaaaagaggggaaagagaagaaggagaaacccaagagcaaaacagcccagcagattgccaaagacatggaacgctgggctaagagtttgaataagcagaaagaaaactttaaaaatagctttcagcctgtcaattccttgagggaagaagaaaggagagaatctgctgcagcagacgctggctttgctctctttgagaagaagggagccttagctgaaaggcagcagctcatcccagaattggtgcgaaatggagatgaggagaatcccctcaaaaggggtctggttgctgcttacagtggtgacagtgacaatgaggaggagctggtggagagacttgagagtgaggaagagaagctagctgactggaagaagatggcctgtctgctctgccggcgccagttcccgaacaaagatgccctagtcaggcaccagcaactctcagaccttcacaagcaaaacatggacatctatcgacgatccaggctgagcgagcaggagctggaagccttggagctaagggagagagagatgaaataccgagaccgagctgcagaaagacgggagaagtacggcattccagaacctccagagcccaagcgcaagaagcagtttgatgccggcactgtgaattacgagcaacccaccaaagatggcattgaccacagtaacattggcaacaagatgctgcaggccatgggctggcgggaaggctctggcttgggacgaaagtgtcaaggcattacggctcccattgaggctcaagttcggctaaagggagctggcctaggagccaaaggcagcgcatatggtttgtcgggcgccgattcctacaaagatgctgtccggaaagccatgtttgcccggttcactgagatggagtgagagagagagagagagagagatgacaaggagcacaagaagtggtccatctcccgaattcgctgttaccgcctgtctctttaagggcatgccttgtgctgttaatagatcttagggtgaaccacttcattctgcagggttctccctcccaccttaaagaagttccccttatgtgggttgcctggtgaatggccttccttcccgccagagggcttgtgaacagaccggagaggacagtggattgtttatactccagtgtacatagtgtaatgtagcgtgtttacatgtgtagcctatgttgtggtccatcagcccctcacattcctaggggtttgagatgctgtaggtggtatgtgacaccaaagccacctctgtcatttgttgtgatgtcttttcttggcaaaagccttgtgtatatttgtatattacacatttgtacagaattttggaagattttcagtctagttgccaaatctggctcctttacaaaagaaataccttg

SEQ ID NO: 4483 - DNA, 427 bp, Homo sapiens
  source 1..427: mol_type = genomic DNA
cttgtctcctagaaaaaataaaatttgaaccttttggagctgtgtgctaaatcttcagtgggacaatgggttcagacaaaagagtgagtagaacagagcgtagtggaagatacggttccatcatagacagggatgaccgtgatgagcgtgaatcccgaagcaggcggagggactcagattacaaaagatctagtgatgatcggaggggtgatagatatgatgactaccgagactatgacagtccagagagagagcgtgaaagaaggaacagtgaccgatccgaagatggctaccattcagatggtgactatggtgagcacgactataggcatgacatcagtgacgagagggagagcaagaccatcatgctgcgcggccttcccatcaccatcacagagagcgatattcgagaaatgatggagtcctt

SEQ ID NO: 4484 - DNA, 582 bp, Homo sapiens
  source 1..582: mol_type = genomic DNA
acgttattaatgtagtagatttcagtcagctcagtatcccagcttctacgaggttttacatttttcatcagaagtgtttgaatttcatgttgctccttgtattaatgaagacacttggattaatgttttaacggtcaactatcccacggagttgctttgatacaaaaccaaggagctgattgtagctctgccctttttgctttgtaattctaagaaaaaataaaatttgaaccttttggagctgtgtgctaaatcttcagtgggacaatgggttcagacaaaagagtgagtagaacagagcgtagtggaagatacggttccatcatagacagggatgaccgtgatgagcgtgaatcccgaagcaggcggagggactcagattacaaaagatctagtgatgatcggaggggtgatagatatgatgactaccgagactatgacagtccagagagagagcgtgaaagaaggaacagtgaccgatccgaagatggctaccattcagatggtgactatggtgagcacgactataggcatgacatcagtgacgagagggagagcaagaccatcatgctgcgcggcctt

SEQ ID NO: 4485 - DNA, 2017 bp, Homo sapiens
  source 1..2017: mol_type = genomic DNA
aatggtttcagatcaggagaaagagacttggtcctctcagatggtaaccgcgtcagcgctttctctgtagctagtacggctattgctgctgctcagtggtcatccacccagtctcaaagtggtgaaggaggcagtgttgactacagttatctgcaaccaggtcaagatggctatgcccaatatgctcagtattcacaggattatcagcagttttatcaacaacaagctggaggattggaatctgatgcatcatctgcatcaggcacagcagtgaccaccacctcagcggctgtagtgtcccagagtcctcagctgtataatcaaacctccaatccacctggctctccgactgaggaagcacagcctagcactagcacaagtacacaggccccagccgcttcccctactggtgtagttcctggtaccaaatatgcagtacctgacacgtccacttaccagtatgatgaatcttcaggatattactatgatccgacaacagggctctattatgaccccaactcgcaatactactataattccttgacccagcagtacctttactgggatggggaaaaagagacctacgtgccagctgcagagtctagctcccaccagcagtcgggcctgcctcctgcaaaagaggggaaagagaagaaggagaaacccaagagcaaaacagcccagcagattgccaaagacatggaacgctgggctaagagtttgaataagcagaaagaaaactttaaaaatagctttcagcctgtcaattccttgagggaagaagaaaggagagaatctgctgcagcagacgctggctttgctctctttgagaagaagggagccttagctgaaaggcagcagctcatcccagaattggtgcgaaatggagatgaggagaatcccctcaaaaggggtctggttgctgcttacagtggtgacagtgacaatgaggaggagctggtggagagacttgagagtgaggaagagaagctagctgactggaagaagatggcctgtctgctctgccggcgccagttcccgaacaaagatgccctagtcaggcaccagcaactctcagaccttcacaagcaaaacatggacatctatcgacgatccaggctgagcgagcaggagctggaagccttggagctaagggagagagagatgaaataccgagaccgagctgcagaaagacgggagaagtacggcattccagaacctccagagcccaagcgcaagaagcagtttgatgccggcactgtgaattacgagcaacccaccaaagatggcattgaccacagtaacattggcaacaagatgctgcaggccatgggctggcgggaaggctctggcttgggacgaaagtgtcaaggcattacggctcccattgaggctcaagttcggctaaagggagctggcctaggagccaaaggcagcgcatatggtttgtcgggcgccgattcctacaaagatgctgtccggaaagccatgtttgcccggttcactgagatggagtgagagagagagagagagagagatgacaaggagcacaagaagtggtccatctcccgaattcgctgttaccgcctgtctctttaagggcatgccttgtgctgttaatagatcttagggtgaaccacttcattctgcagggttctccctcccaccttaaagaagttccccttatgtgggttgcctggtgaatggccttccttcccgccagagggcttgtgaacagaccggagaggacagtggattgtttatactccagtgtacatagtgtaatgtagcgtgtttacatgtgtagcctatgttgtggtccatcagcccctcacattcctaggggtttgagatgctgtaggtggtatgtgacaccaaagccacctctgtcatttgttgtgatgtcttttcttggcaaaagccttgtgtatatttgtatattacacatttgtacagaattttggaagattttcagtctagttgccaaatctggctcctttacaaaagaaataccttg

SEQ ID NO: 4486 - DNA, 2870 bp, Homo sapiens
  source 1..2870: mol_type = genomic DNA
ggtacaaaatgcagagtgagtagaacagagcgtagtggaagatacggttccatcatagacagggatgaccgtgatgagcgtgaatcccgaagcaggcggagggactcagattacaaaagatctagtgatgatcggaggggtgatagatatgatgactaccgagactatgacagtccagagagagagcgtgaaagaaggaacagtgaccgatccgaagatggctaccattcagatggtgactatggtgagcacgactataggcatgacatcagtgacgagagggagagcaagaccatcatgctgcgcggccttcccatcaccatcacagagagcgatattcgagaaatgatggagtccttcgaaggccctcagcctgcggatgtgaggctgatgaagaggaaaacagaaaaagttggtgattcaaggaaagcacattgcaatgcattatagcaatcccagacctaagtttgaagattggctttgtaacaagtgctgccttaacaatttcaggaaaagactaaaatgcttccgatgtggagcagacaagtttgactctgaacaggaagtgcctcctggaaccacagagtcggttcagtctgtggattactactgtgatacgatcattcttcggaacatagctccgcacactgtggtggattccatcatgacagcactgtctccttacgcgtctttagctgtcaataacatccgcctcataaaagacaaacagacccagcagaacagaggcttcgcatttgtgcagctgtcctctgcaatggatgcttctcagctgcttcagatattacagagtctccatcctcctttgaaaattgatggcaaaactattggggttgattttgcaaaaagtgccagaaaagacttggtcctctcagatggtaaccgcgtcagcgctttctctgtagctagtacggctattgctgctgctcagtggtcatccacccagtctcaaagtggtgaaggaggcagtgttgactacagttatctgcaaccaggtcaagatggctatgcccaatatgctcagtattcacaggattatcagcagttttatcaacaacaagctggaggattggaatctgatgcatcatctgcatcaggcacagcagtgaccaccacctcagcggctgtagtgtcccagagtcctcagctgtataatcaaacctccaatccacctggctctccgactgaggaagcacagcctagcactagcacaagtacacaggccccagccgcttcccctactggtgtagttcctggtaccaaatatgcagtacctgacacgtccacttaccagtatgatgaatcttcaggatattactatgatccgacaacagggctctattatgaccccaactcgcaatactactataattccttgacccagcagtacctttactgggatggggaaaaagagacctacgtgccagctgcagagtctagctcccaccagcagtcgggcctgcctcctgcaaaagaggggaaagagaagaaggagaaacccaagagcaaaacagcccagcagattgccaaagacatggaacgctgggctaagagtttgaataagcagaaagaaaactttaaaaatagctttcagcctgtcaattccttgagggaagaagaaaggagagaatctgctgcagcagacgctggctttgctctctttgagaagaagggagccttagctgaaaggcagcagctcatcccagaattggtgcgaaatggagatgaggagaatcccctcaaaaggggtctggttgctgcttacagtggtgacagtgacaatgaggaggagctggtggagagacttgagagtgaggaagagaagctagctgactggaagaagatggcctgtctgctctgccggcgccagttcccgaacaaagatgccctagtcaggcaccagcaactctcagaccttcacaagcaaaacatggacatctatcgacgatccaggctgagcgagcaggagctggaagccttggagctaagggagagagagatgaaataccgagaccgagctgcagaaagacgggagaagtacggcattccagaacctccagagcccaagcgcaagaagcagtttgatgccggcactgtgaattacgagcaacccaccaaagatggcattgaccacagtaacattggcaacaagatgctgcaggccatgggctggcgggaaggctctggcttgggacgaaagtgtcaaggcattacggctcccattgaggctcaagttcggctaaagggagctggcctaggagccaaaggcagcgcatatggtttgtcgggcgccgattcctacaaagatgctgtccggaaagccatgtttgcccggttcactgagatggagtgagagagagagagagagagagatgacaaggagcacaagaagtggtccatctcccgaattcgctgttaccgcctgtctctttaagggcatgccttgtgctgttaatagatcttagggtgaaccacttcattctgcagggttctccctcccaccttaaagaagttccccttatgtgggttgcctggtgaatggccttccttcccgccagagggcttgtgaacagaccggagaggacagtggattgtttatactccagtgtacatagtgtaatgtagcgtgtttacatgtgtagcctatgttgtggtccatcagcccctcacattcctaggggtttgagatgctgtaggtggtatgtgacaccaaagccacctctgtcatttgttgtgatgtcttttcttggcaaaagccttgtgtatatttgtatattacacatttgtacagaattttggaagattttcagtctagttgccaaatctggctcctttacaaaagaaataccttg

SEQ ID NO: 4487 - DNA, 2324 bp, Homo sapiens
  source 1..2324: mol_type = genomic DNA
agcggcgcggcgcctttgtggtagcagtggccccgcgcggaggaagttccggtgtccgcggcgctgggtcggtggcggaggctgaggagaaggaggagcgggccgtggaggcttcgccgcctaggtactgctataaccagaatttggtagaaaaaggatttacttgttggggccctcttgataaaaagagatgtggggggattctcgacctgctaacagaactggaccttttcggatcaagattataggaccggcccaagtgaggagaaacccagcaggcttattcgattaagtggggtacctgaagatgccacaaaagaagagattcttaatgcttttcggactcctgatggcatgcctgtaaagaacttgcagttgaaggagtataacacagggaactctaatgatccaggacaaagaagttaccctggagtatgtatcaagcctggatttttggtactgcaaacgatgtaaggcaaacattggtgggcaccgatcttcctgttcattctgcaagaacccaagagaagtgacagaggccaagcaagaattaataacctaccctcagcctcagaaaacatccataccagcaccattggaaaaacagcccaaccagcccctaagaccagctgataaggaacctgaacccaggaagagggaagaaggccaagagtcacgcttaggacatcaaaagagagaagcagaaaggtatctgcctccttctcgaagggaagggccaactttccgaagagaccgagagagggagtcatggtctggagagacacgccaggatggagagagcaaaactatcatgctaaagcgtatctatcgttccacaccacctgaggtgatagtggaagtgctggagccctatgtccgccttactactgccaacgtccgtatcatcaagaacagaacaggccctatggggcatacctatggctttattgacctcgactcccatgcggaagctcttcgtgtggtgaagatcttacagaaccttgatccgccatttagcattgatgggaagatggtagctgtaaacctggccactggaaaacgaagaaatgattctggggaccattctgaccacatgcattactatcagggtaaaaaatatttccgagataggaggggaggtggcagaaattcagactggtcttcagatacaaatcgacaaggacaacagtcatcatctgactgctacatatatgattctgctactggctactattatgaccccttggcaggaacttattatgaccccaatacccagcaagaagtctatgtgccccaggatcctggattacctgaggaagaagagatcaaggaaaaaaaacccaccagtcaaggaaagtcaagtagcaagaaggaaatgtctaaaagagatggcaaggagaaaaaagacagaggagtgacgaggtttcaggaaaatgccagtgaagggaaggcccctgcagaagacgtctttaagaagcccctgcctcctactgtgaagaaggaagagagtccccctccacctaaagtggtaaacccactgatcggcctcttgggtgaatatggaggagacagtgactatgaggaggaagaagaggaggaacagacccctcccccacagccccgcacagcacagccccagaagcgagaggagcaaaccaagaaggagaatgaagaagacaaactcactgactggaataaactggcttgtctgctttgcagaaggcagtttcccaataaagaagttctgatcaaacaccagcagctgtcagacctgcacaagcaaaacctggaaatccaccggaagataaaacagtctgagcaggagctagcctatctggaaaggagagaacgagagggaaagtttaaaggaagaggaaatgatcgcagggaaaagctccagtcttttgactctccagaaaggaaacggattaagtactccagggaaactgacagtgatcgtaaacttgttgataaagaagatatcgacactagcagcaaaggaggctgtgtccaacaggctactggctggaggaaagggacaggcctgggatatggccatcctggattggcttcatcagaggaggctgaaggccggatgaggggccccagtgttggagcctcaggaagaaccagcaaaagacagtccaacgagacttaccgagatgctgttcgaagagtcatgtttgctcgatataaagaactcgattaagaaaggagacaagttccatgggatacaacctccctcttgttttgtttgtctctccttttcttttgttactgttcttgctgctagaacttttttaaataaactttttttcaatgtg

SEQ ID NO: 4488 - DNA, 2260 bp, Homo sapiens
  source 1..2260: mol_type = genomic DNA
gaaggcaagtcccctgcgcgcggggcacggcgggagtaagagtctgcgggaccggcagctgtacttcatctcccagcgggccgagcgctgaaggcagcggcgcggcgcctttgtggtagcagtggccccgcgcggaggaagttccggtgtccgcggcgctgggtcggtggcggaggctgaggagaaggaggagcgggccgtggaggcttcgccgcctaggtactgctataaccagaatttggtagaaaaaggatttacttgttggggccctcttgataaaaagagatgtggggggattctcgacctgctaacagaactggaccttttcgggaactctaatgatccaggacaaagaagttaccctggagtatgtatcaagcctggatttttggtactgcaaacgatgtaaggcaaacattggtgggcaccgatcttcctgttcattctgcaagaacccaagagaagtgacagaggccaagcaagaattaataacctaccctcagcctcagaaaacatccataccagcaccattggaaaaacagcccaaccagcccctaagaccagctgataaggaacctgaacccaggaagagggaagaaggccaagagtcacgcttaggacatcaaaagagagaagcagaaaggtatctgcctccttctcgaagggaagggccaactttccgaagagaccgagagagggagtcatggtctggagagacacgccaggatggagagagcaaaactatcatgctaaagcgtatctatcgttccacaccacctgaggtgatagtggaagtgctggagccctatgtccgccttactactgccaacgtccgtatcatcaagaacagaacaggccctatggggcatacctatggctttattgacctcgactcccatgcggaagctcttcgtgtggtgaagatcttacagaaccttgatccgccatttagcattgatgggaagatggtagctgtaaacctggccactggaaaacgaagaaatgattctggggaccattctgaccacatgcattactatcagggtaaaaaatatttccgagataggaggggaggtggcagaaattcagactggtcttcagatacaaatcgacaaggacaacagtcatcatctgactgctacatatatgattctgctactggctactattatgaccccttggcaggaacttattatgaccccaatacccagcaagaagtctatgtgccccaggatcctggattacctgaggaagaagagatcaaggaaaaaaaacccaccagtcaaggaaagtcaagtagcaagaaggaaatgtctaaaagagatggcaaggagaaaaaagacagaggagtgacgaggtttcaggaaaatgccagtgaagggaaggcccctgcagaagacgtctttaagaagcccctgcctcctactgtgaagaaggaagagagtccccctccacctaaagtggtaaacccactgatcggcctcttgggtgaatatggaggagacagtgactatgaggaggaagaagaggaggaacagacccctcccccacagccccgcacagcacagccccagaagcgagaggagcaaaccaagaaggagaatgaagaagacaaactcactgactggaataaactggcttgtctgctttgcagaaggcagtttcccaataaagaagttctgatcaaacaccagcagctgtcagacctgcacaagcaaaacctggaaatccaccggaagataaaacagtctgagcaggagctagcctatctggaaaggagagaacgagagggaaagtttaaaggaagaggaaatgatcgcagggaaaagctccagtcttttgactctccagaaaggaaacggattaagtactccagggaaactgacagtgatcgtaaacttgttgataaagaagatatcgacactagcagcaaaggaggctgtgtccaacaggctactggctggaggaaagggacaggcctgggatatggccatcctggattggcttcatcagaggaggctgaaggccggatgaggggccccagtgttggagcctcaggaagaaccagcaaaagacagtccaacgagacttaccgagatgctgttcgaagagtcatgtttgctcgatataaagaactcgattaagaaaggagacaagttccatgggatacaacctccctcttgttttgtttgtctctccttttcttttgttactgttcttgctgctagaacttttttaaataaactttttttcaatgtga

SEQ ID NO: 4489 - DNA, 1886 bp, Homo sapiens
  source 1..1886: mol_type = genomic DNA
cggtgtccgcggcgctgggtcggtggcggaggctgaggagaaggaggagcgggccgtggaggcttcgccgcctaggtactgctataaccagaatttggtagaaaaaggatttacttgttggggccctcttgataaaaagagatgtggggggattctcgacctgctaacagaactggaccttttcgtgggagccaagaagaaaggtttgctcccgggtggaacagggattatcctcctcctccccttaagagtcatgctcaagagagacactctggcaactttcctggcagagattcacttccctttgatttccaggggcattcggggcctccttttgcaaatgtagaggagcattctttcagctatggagctagagacggaccgcatggtgactatcgaggaggggagggacctggacatgatttcagggggggagatttttcgtcttctgatttccagagcagagattcatcacagttggacttcaggggtagggacatacattctggggattttcgggatagagaaggaccacctatggactataggggtggagatggtacttctatggattatagaggtagggaggcacctcatatgaactacagagacagggatgctcacgctgttgacttcagaggtagggatgctcctccatctgacttcaggggccggggcacttatgatttagattttagaggccgggatggatcccatgcagattttaggggaagggatttatcagatttggattttagggccagagaacagtcccgttctgattttaggaatagagatgtatctgatttggactttagagacaaagacggaacacaagtagactttagaggccgaggttcaggtactactgatctagactttagggacagggatacgccacattcagatttcagaggtagacaccgatctaggactgatcaggattttaggggcagagagatgggatcttgtatggaatttaaagatagggagatgccccctgtggatccaaatattttggattacattcagccctctacacaagatagagaacattctggtatgaatgtgaacaggagagaagaatccacacatgaccatacgatagaaaggcctgcttttggcattcagaagggagaatttgagcattcagaaacaagagaaggagaaacacaaggtgtagcctttgaacatgagtctccagcagactttcagaacagccaaagtccagttcaagaccaagataagtcacagctttctggacgtgaagagcagagttcagatgctggtctgtttaaagaagaaggcggtctggactttcttgggcggcaagacaccgattacagaagcatggagtaccgtgatgtggatcataggctgccaggaagccagatgtttggctatggccagagcaagtcttttccagagggcaaaactgcccgagatgcccaacgggaccttcaggatcaagattataggaccggcccaagtgaggagaaacccagcaggcttattcgattaagtggggtacctgaagatgccacaaaagaagagattcttaatgcttttcggactcctgatggcatgcctgtaaagaacttgcagttgaaggagtataacacagggaactctaatgatccaggacaaagaagttaccctggagtatgtatcaagcctggatttttggtactgcaaacgatgtaaggcaaacattggtgggcaccgatcttcctgttcattctgcaagaacccaagagaagtgacagaggccaagcaagaattaataacctaccctcagcctcagaaaacatccataccagcaccattggaaaaacagcccaaccagcccctaagaccagctgataaggaacctgaacccaggaaga

SEQ ID NO: 4490 - DNA, 4010 bp, Homo sapiens
  source 1..4010: mol_type = genomic DNA
agtaagagtctgcgggaccggcagctgtacttcatctcccagcgggccgagcgctgaaggcagcggcgcggcgcctttgtggtagcagtggccccgcgcggaggaagttccggtgtccgcggcgctgggtcggtggcggaggctgaggagaaggaggagcgggccgtggaggcttcgccgcctaggtactgctataaccagaatttggtagaaaaaggatttacttgttggggccctcttgataaaaagagatgtggggggattctcgacctgctaacagaactggaccttttcggactgggtgaaagctttttctgcagcagtcatgttgaaaaccttgtgttgactttcctcgtgttctgaaatgggagcataaaagtttactccgccacttcgtcttaaaatagcaaaactttgctgttttctgcagatctaggaccttgttacagaactctgccaaaaaaaaaatgtttacagaagaatgtgctgtgattagagaagaatatgctggtgtgtagatttcaaactctctggacaatatgaataacactgtctttgtttctacagtgggagccaagaagaaaggtttgctcccgggtggaacagggattatcctcctcctccccttaagagtcatgctcaagagagacactctggcaactttcctggcagagattcacttccctttgatttccaggggcattcggggcctccttttgcaaatgtagaggagcattctttcagctatggagctagagacggaccgcatggtgactatcgaggaggggagggacctggacatgatttcagggggggagatttttcgtcttctgatttccagagcagagattcatcacagttggacttcaggggtagggacatacattctggggattttcgggatagagaaggaccacctatggactataggggtggagatggtacttctatggattatagaggtagggaggcacctcatatgaactacagagacagggatgctcacgctgttgacttcagaggtagggatgctcctccatctgacttcaggggccggggcacttatgatttagattttagaggccgggatggatcccatgcagattttaggggaagggatttatcagatttggattttagggccagagaacagtcccgttctgattttaggaatagagatgtatctgatttggactttagagacaaagacggaacacaagtagactttagaggccgaggttcaggtactactgatctagactttagggacagggatacgccacattcagatttcagaggtagacaccgatctaggactgatcaggattttaggggcagagagatgggatcttgtatggaatttaaagatagggagatgccccctgtggatccaaatattttggattacattcagccctctacacaagatagagaacattctggtatgaatgtgaacaggagagaagaatccacacatgaccatacgatagaaaggcctgcttttggcattcagaagggagaatttgagcattcagaaacaagagaaggagaaacacaaggtgtagcctttgaacatgagtctccagcagactttcagaacagccaaagtccagttcaagaccaagataagtcacagctttctggacgtgaagagcagagttcagatgctggtctgtttaaagaagaaggcggtctggactttcttgggcggcaagacaccgattacagaagcatggagtaccgtgatgtggatcataggctgccaggaagccagatgtttggctatggccagagcaagtcttttccagagggcaaaactgcccgagatgcccaacgggaccttcaggatcaagattataggaccggcccaagtgaggagaaacccagcaggcttattcgattaagtggggtacctgaagatgccacaaaagaagagattcttaatgcttttcggactcctgatggcatgcctgtaaagaacttgcagttgaaggagtataacacaggttacgactatggctatgtctgcgtggagttttcactcttggaagatgccatcggatgcatggaggccaaccagggaactctaatgatccaggacaaagaagttaccctggagtatgtatcaagcctggatttttggtactgcaaacgatgtaaggcaaacattggtgggcaccgatcttcctgttcattctgcaagaacccaagagaagtgacagaggccaagcaagaattaataacctaccctcagcctcagaaaacatccataccagcaccattggaaaaacagcccaaccagcccctaagaccagctgataaggaacctgaacccaggaagagggaagaaggccaagagtcacgcttaggacatcaaaagagagaagcagaaaggtatctgcctccttctcgaagggaagggccaactttccgaagagaccgagagagggagtcatggtctggagagacacgccaggatggagagagcaaaactatcatgctaaagcgtatctatcgttccacaccacctgaggtgatagtggaagtgctggagccctatgtccgccttactactgccaacgtccgtatcatcaagaacagaacaggccctatggggcatacctatggctttattgacctcgactcccatgcggaagctcttcgtgtggtgaagatcttacagaaccttgatccgccatttagcattgatgggaagatggtagctgtaaacctggccactggaaaacgaagaaatgattctggggaccattctgaccacatgcattactatcagggtaaaaaatatttccgagataggaggggaggtggcagaaattcagactggtcttcagatacaaatcgacaaggacaacagtcatcatctgactgctacatatatgattctgctactggctactattatgaccccttggcaggaacttattatgaccccaatacccagcaagaagtctatgtgccccaggatcctggattacctgaggaagaagagatcaaggaaaaaaaacccaccagtcaaggaaagtcaagtagcaagaaggaaatgtctaaaagagatggcaaggagaaaaaagacagaggagtgacgaggtttcaggaaaatgccagtgaagggaaggcccctgcagaagacgtctttaagaagcccctgcctcctactgtgaagaaggaagagagtccccctccacctaaagtggtaaacccactgatcggcctcttgggtgaatatggaggagacagtgactatgaggaggaagaagaggaggaacagacccctcccccacagccccgcacagcacagccccagaagcgagaggagcaaaccaagaaggagaatgaagaagacaaactcactgactggaataaactggcttgtctgctttgcagaaggcagtttcccaataaagaagttctgatcaaacaccagcagctgtcagacctgcacaagcaaaacctggaaatccaccggaagataaaacagtctgagcaggagctagcctatctggaaaggagagaacgagagggaaagtttaaaggaagaggaaatgatcgcagggaaaagctccagtcttttgactctccagaaaggaaacggattaagtactccagggaaactgacagtgatcgtaaacttgttgataaagaagatatcgacactagcagcaaaggaggctgtgtccaacaggctactggctggaggaaagggacaggcctgggatatggccatcctggattggcttcatcagaggaggctgaaggccggatgaggggccccagtgttggagcctcaggaagaaccagcaaaagacagtccaacgagacttaccgagatgctgttcgaagagtcatgtttgctcgatataaagaactcgattaagaaaggagacaagttccatgggatacaacctccctcttgttttgtttgtctctccttttcttttgttactgttcttgctgctagaacttttttaaataaactttttttcaatgtg

SEQ ID NO: 4491 - DNA, 591 bp, Homo sapiens
  source 1..591: mol_type = genomic DNA
ttcatctcccagcgggccgagcgctgaaggcagcggcgcggcgcctttgtggtagcagtggccccgcgcggaggaagttccggtgtccgcggcgctgggtactgctataaccagaatttggtagaaaaaggatttacttgttggggccctcttgataaaaagagatgtggggggattctcgacctgctaacagaactggaccttttcgtgggagccaagaagaaaggtttgctcccgggtggaacagggattatcctcctcctccccttaagagtcatgctcaagagagacactctggcaactttcctggcagagattcacttccctttgatttccaggggcattcggggcctccttttgcaaatgtagaggagcattctttcagctatggagctagagacggaccgcatggtgactatcgaggaggggagggacctggacatgatttcagggggggagatttttcgtcttctgatttccagagcagagattcatcacagttggacttcaggggtagggacatacattctggggattttcgggatagagaaggaccacctatggactataggggtggagatggtacttcta

SEQ ID NO: 4492 - DNA, 582 bp, Homo sapiens
  source 1..582: mol_type = genomic DNA
agtagattaccggtcccgccgcggagcggccagctgtgaggctggggccggcgcgtggttgcggctctgtgctcctactcttcggagctgtaagcgggctgttcttgcggttttcctgtttcagatccaattctgtggcatcactaggaagggagctcttgtgcttagcacgtagcctcgtcctcagacttggacagacacaagggaggctccgctggaccggagggcacaagagctccgagcccggtcgtcggggcggtagaacctggaagcgggagagtggtctggtactgctataaccagaatttggtagaaaaaggatttacttgttggggccctcttgataaaaagagatgtggggggattctcgacctgctaacagaactggaccttttcgtgggagccaagaagaaaggtttgctcccgggtggaacagggattatcctcctcctccccttaagagtcatgctcaagagagacactctggcaactttcctggcagagattcacttccctttgatttccaggggcattcggggcctccttttgcaaatgtagaggagcattctttcagctatggag

SEQ ID NO: 4493 - DNA, 2128 bp, Homo sapiens
  source 1..2128: mol_type = genomic DNA
agctgtacttcatctcccagcgggccgagcgctgaaggcagcggcgcggcgcctttgtggtagcagtggccccgcgcggaggaagttccggtgtccgcggcgctgggtcggtggcggaggctgaggagaaggaggagcgggccgtggaggcttcgccgcctaggtactgctataaccagaatttggtagaaaaaggatttacttgttggggccctcttgataaaaagagatgtggggggattctcgacctgctaacagaactggaccttttcgtgtaaggcaaacattggtgggcaccgatcttcctgttcattctgcaagaacccaagagaagtgacagaggccaagcaagaattaataacctaccctcagcctcagaaaacatccataccagcaccattggaaaaacagcccaaccagcccctaagaccagctgataaggaacctgaacccaggaagagggaagaaggccaagagtcacgcttaggacatcaaaagagagaagcagaaaggtatctgcctccttctcgaagggaagggccaactttccgaagagaccgagagagggagtcatggtctggagagacacgccaggatggagagagcaaaactatcatgctaaagcgtatctatcgttccacaccacctgaggtgatagtggaagtgctggagccctatgtccgccttactactgccaacgtccgtatcatcaagaacagaacaggccctatggggcatacctatggctttattgacctcgactcccatgcggaagctcttcgtgtggtgaagatcttacagaaccttgatccgccatttagcattgatgggaagatggtagctgtaaacctggccactggaaaacgaagaaatgattctggggaccattctgaccacatgcattactatcagggtaaaaaatatttccgagataggaggggaggtggcagaaattcagactggtcttcagatacaaatcgacaaggacaacagtcatcatctgactgctacatatatgattctgctactggctactattatgaccccttggcaggaacttattatgaccccaatacccagcaagaagtctatgtgccccaggatcctggattacctgaggaagaagagatcaaggaaaaaaaacccaccagtcaaggaaagtcaagtagcaagaaggaaatgtctaaaagagatggcaaggagaaaaaagacagaggagtgacgaggtttcaggaaaatgccagtgaagggaaggcccctgcagaagacgtctttaagaagcccctgcctcctactgtgaagaaggaagagagtccccctccacctaaagtggtaaacccactgatcggcctcttgggtgaatatggaggagacagtgactatgaggaggaagaagaggaggaacagacccctcccccacagccccgcacagcacagccccagaagcgagaggagcaaaccaagaaggagaatgaagaagacaaactcactgactggaataaactggcttgtctgctttgcagaaggcagtttcccaataaagaagttctgatcaaacaccagcagctgtcagacctgcacaagcaaaacctggaaatccaccggaagataaaacagtctgagcaggagctagcctatctggaaaggagagaacgagagggaaagtttaaaggaagaggaaatgatcgcagggaaaagctccagtcttttgactctccagaaaggaaacggattaagtactccagggaaactgacagtgatcgtaaacttgttgataaagaagatatcgacactagcagcaaaggaggctgtgtccaacaggctactggctggaggaaagggacaggcctgggatatggccatcctggattggcttcatcagaggaggctgaaggccggatgaggggccccagtgttggagcctcaggaagaaccagcaaaagacagtccaacgagacttaccgagatgctgttcgaagagtcatgtttgctcgatataaagaactcgattaagaaaggagacaagttccatgggatacaacctccctcttgttttgtttgtctctccttttcttttgttactgttcttgctgctagaacttttttaaataaactttttttcaatgtg

SEQ ID NO: 4494 - DNA, 3748 bp, Homo sapiens
  source 1..3748: mol_type = genomic DNA
acggcgggagtaagagtctgcgggaccggcagctgtacttcatctcccagcgggccgagcgctgaaggcagcggcgcggcgcctttgtggtagcagtggccccgcgcggaggaagttccggtgtccgcggcgctgggtcggtggcggaggctgaggagaaggaggagcgggccgtggaggcttcgccgcctaggtactgctataaccagaatttggtagaaaaaggatttacttgttggggccctcttgataaaaagagatgtggggggattctcgacctgctaacagaactggaccttttcgtgggagccaagaagaaaggtttgctcccgggtggaacagggattatcctcctcctccccttaagagtcatgctcaagagagacactctggcaactttcctggcagagattcacttccctttgatttccaggggcattcggggcctccttttgcaaatgtagaggagcattctttcagctatggagctagagacggaccgcatggtgactatcgaggaggggagggacctggacatgatttcagggggggagatttttcgtcttctgatttccagagcagagattcatcacagttggacttcaggggtagggacatacattctggggattttcgggatagagaaggaccacctatggactataggggtggagatggtacttctatggattatagaggtagggaggcacctcatatgaactacagagacagggatgctcacgctgttgacttcagaggtagggatgctcctccatctgacttcaggggccggggcacttatgatttagattttagaggccgggatggatcccatgcagattttaggggaagggatttatcagatttggattttagggccagagaacagtcccgttctgattttaggaatagagatgtatctgatttggactttagagacaaagacggaacacaagtagactttagaggccgaggttcaggtactactgatctagactttagggacagggatacgccacattcagatttcagaggtagacaccgatctaggactgatcaggattttaggggcagagagatgggatcttgtatggaatttaaagatagggagatgccccctgtggatccaaatattttggattacattcagccctctacacaagatagagaacattctggtatgaatgtgaacaggagagaagaatccacacatgaccatacgatagaaaggcctgcttttggcattcagaagggagaatttgagcattcagaaacaagagaaggagaaacacaaggtgtagcctttgaacatgagtctccagcagactttcagaacagccaaagtccagttcaagaccaagataagtcacagctttctggacgtgaagagcagagttcagatgctggtctgtttaaagaagaaggcggtctggactttcttgggcggcaagacaccgattacagaagcatggagtaccgtgatgtggatcataggctgccaggaagccagatgtttggctatggccagagcaagtcttttccagagggcaaaactgcccgagatgcccaacgggaccttcaggatcaagattataggaccggcccaagtgaggagaaacccagcaggcttattcgattaagtggggtacctgaagatgccacaaaagaagagattcttaatgcttttcggactcctgatggcatgcctgtaaagaacttgcagttgaaggagtataacacaggttacgactatggctatgtctgcgtggagttttcactcttggaagatgccatcggatgcatggaggccaaccagggaactctaatgatccaggacaaagaagttaccctggagtatgtatcaagcctggatttttggtactgcaaacgatgtaaggcaaacattggtgggcaccgatcttcctgttcattctgcaagaacccaagagaagtgacagaggccaagcaagaattaataacctaccctcagcctcagaaaacatccataccagcaccattggaaaaacagcccaaccagcccctaagaccagctgataaggaacctgaacccaggaagagggaagaaggccaagagtcacgcttaggacatcaaaagagagaagcagaaaggtatctgcctccttctcgaagggaagggccaactttccgaagagaccgagagagggagtcatggtctggagagacacgccaggatggagagagcaaaactatcatgctaaagcgtatctatcgttccacaccacctgaggtgatagtggaagtgctggagccctatgtccgccttactactgccaacgtccgtatcatcaagaacagaacaggccctatggggcatacctatggctttattgacctcgactcccatgcggaagctcttcgtgtggtgaagatcttacagaaccttgatccgccatttagcattgatgggaagatggtagctgtaaacctggccactggaaaacgaagaaatgattctggggaccattctgaccacatgcattactatcagggtaaaaaatatttccgagataggaggggaggtggcagaaattcagactggtcttcagatacaaatcgacaaggacaacagtcatcatctgactgctacatatatgattctgctactggctactattatgaccccttggcaggaacttattatgaccccaatacccagcaagaagtctatgtgccccaggatcctggattacctgaggaagaagagatcaaggaaaaaaaacccaccagtcaaggaaagtcaagtagcaagaaggaaatgtctaaaagagatggcaaggagaaaaaagacagaggagtgacgaggtttcaggaaaatgccagtgaagggaaggcccctgcagaagacgtctttaagaagcccctgcctcctactgtgaagaaggaagagagtccccctccacctaaagtggtaaacccactgatcggcctcttgggtgaatatggaggagacagtgactatgaggaggaagaagaggaggaacagacccctcccccacagccccgcacagcacagccccagaagcgagaggagcaaaccaagaaggagaatgaagaagacaaactcactgactggaataaactggcttgtctgctttgcagaaggcagtttcccaataaagaagttctgatcaaacaccagcagctgtcagacctgcacaagcaaaacctggaaatccaccggaagataaaacagtctgagcaggagctagcctatctggaaaggagagaacgagagggaaagtttaaaggaagaggaaatgatcgcagggaaaagctccagtcttttgactctccagaaaggaaacggattaagtactccagggaaactgacagtgatcgtaaacttgttgataaagaagatatcgacactagcagcaaaggaggctgtgtccaacaggctactggctggaggaaagggacaggcctgggatatggccatcctggattggcttcatcagaggaggctgaaggccggatgaggggccccagtgttggagcctcaggaagaaccagcaaaagacagtccaacgagacttaccgagatgctgttcgaagagtcatgtttgctcgatataaagaactcgattaagaaaggagacaagttccatgggatacaacctccctcttgttttgtttgtctctccttttcttttgttactgttcttgctgctagaacttttttaaataaactttttttcaatgtgat

SEQ ID NO: 4495 - DNA, 4243 bp, Homo sapiens
  source 1..4243: mol_type = genomic DNA
agatcgggttcaacggcagggattgggtaaggtgagaatctggcttggcggctccggccccggccatctggttcccttgggctccggccgccaccatccactcgacggctctcggcccgaacgcttggtcgcaccgcctgccgaggtcctagatgaatcgcttcaggcctggaaacgaggaagccgtctccggagaccatcgccaacgctgacgcccgcggtctgaggtcgccatgggaagagcggtaggccaccctgctcctctgatcaccggaggacagggacacattgttcagggccatattcaaacactgcccgcagtacttgcgttacgtccctttgtgaaggcaggcccttcgcggctccccagatcagtccagcctgtgtcggacccgatgactaagcacacaggaacccataactgagcctgcggaagagccagaagccgccttgcctttaacgaggggtatcctggcgagcatgcgcagaccgtccgcgcacgtcgtcgcccgctgagagcaagcgcaacgggcgttttcgtttgtgacgccagggagcgtgaggacgtggggcttccgtgaatgcgcagtgggtgcgtcggccacgaccttttggccaggttagggagggggcgacgctgagatgggggcggcggcggcggaagcggatcgcactctctttgtgggcaaccttgaaacgaaagtgaccgaggagctccttttcgagcttttccaccaggctgggccagtaataaaggtgaaaattccaaaagataaggatggtaaaccaaagcagtttgcgtttgtgaatttcaaacatgaagtgtctgttccttatgcaatgaatctacttaatggaatcaaactttatggaaggcctatcaaaattcaatttagatcaggaagtagtcatgccccacaagatgtcagtttgtcatatccccaacatcatgttggaaattcaagccctacctccacatctcctagcaggtacgaaaggactatggataacatgacttcatcagcacagataattcagagatctttctcttctccagaaaattttcagagacaagcagtgatgaacagtgctttgagacaaatgtcatatggtggaaaatttggttcttcacctctggatcaatcaggattttcaccatcagttcaatcacacagtcatagtttcaatcagtcttcaagctcccagtggcgccaaggtacaccatcatcacagcgtaaagtcagaatgaattcttatccctacctagcagatagacattatagccgggaacagcgttacactgatcatgggtctgaccatcattacagaggaaagagagatgatttcttctatgaagacaggaatcatgatgactggagccatgactatgataacagaagagacagtagtagagatggaaaatggcgctcatctcgacactaacacatgttaaaaggacattgtttttatagggtcattttaggccctttgactaagttgatatggaaatattttgttgaaaaactgtacagagcagctttacaagttgtcacatttctttataaatttttttaaagctacagtttaatacaaaatgaattgcggttttattacattaataacctttcacctcagggttttatgaagaggaaagggttttatgcaaaagaaagtgctacaattcctaatcattttagacactttaggagggggtgaagttgtatgataaagcagatattttaattatttgttatctttttgtattgcaagaaatttcttgctagtgaatcaagaaaacatccaggttgacagtctaaaatggctactggtattttagttaattcaaaaatgaaacttttcagtgattcactttactaacattctatttgagaaggcttattggtaaagtttggggataaaggcattgcttaacttcttatataatttaggtataaattctgtgacatgctcttgagctttaccctagttgaacatacatgtgtagatttacacatactgtttcattctaaaatttagaaattgttcattaaatcccatttgaggtataagtcactcaggaagttaaaatatctctacacgtatatttttacattaaaaatacagtgttagcataaatccccttttcaggaagaacaaaaatgtcagtgcatagttagataaaatggtaaaatgttttactgaaagcatacttttttggaaaatagattcatgaagcctttaagtgctgcttctgtcagtcaaacgttaaaaactttaacattttcaaagtgcccagactgtgtacaaagacacatgtaatggagattgtacaggttgtttttttgtttgaacctttgaaagagtttaatcttaacgttttctaattttaaaattttaaaatcttgtttaacaaaagcttgtattaagatactgttttcatttcattacagaattgtttataaaagttcatttgttgaaaaataaggatcctttttaataccacagcatttgtactgttcctttttaatatactgaaaatataaaaggaagggtgtgtgttatttttttttttttatgtcactgacttcagagacattgtacacaaagaattaacatacttttattcactgattgcctgctgtttagaatatcagttctttaattttgagcatcctgaaatacatcttttgtacatatagagcatgatgtttcacaatcagattttcagtgacccctcgattatagcttggagtactttagttaccctcagtggtctctaggagttaaagtacacttagatttcctgtttataaatgaattcagtttttctgtttctaagtaaatgtagctattcaactactcactatagaattaagataaacaatttgtttgcttaagcattttcacagaatttgtttccaatgagattattatttttgggtatcttatccatatgaaaacttagtaggtttgtagatgttaacgaagattaatactgcatgtttgtttttgttttttttttgagacagagtcttgctacgacacccaggctagagtgcaatggcgggatctcaggtcactgcaacctccatatcccgggttcaagtgattctcctgccttagcctcccgagtagctgggattacaggcacccaccaccacgcctggctagtttttgtatttttagtagagatggggtttcaccacattggccaggctggtctcaaactcctgacctcaagtgatccacctaccttggcctaccgaggtgctggaattacaggtgtgagccaccgcgcctggcctaatactgctttattacaacgttatctgtgggtcggatccttttatattggttaacagatgaccctgactcagaataatctttttcaatggctttttgagggaagcttgtgaagttctggtgaatcttctttttcacttcactttcagtgagctgaaagtaaccaaactaaatacatgtattgtgtaaagggacaggacaagacagccttaaaaaattgaatatagttggtgagacaactcagaagtacaggtttgagcatcccttattcaaaatgcttgagaagtgttttgggttctggaatatttgcattaatgcttgccagttgagcatcccaggtccggaaatccacagtgctccaatgagcctttcccctgagtgtcacatctgtattggcactcaaaaagtttcatattttggagcatttcagatttcagatttgggatgcttcatctatattgacagctgcaagaacagaaaggaagaagagattatttttgtgggagaacagtttctcccatagtgtttcctgtggaatgctagtgtctcataaagtcttctaaaaaaaagaaaaaaaaaatcaaatgtttggaagccattttgtgttactgtgtgactttcttttactcaaaaacagcaccataaaatttctgacaagtactataggtaaagaaatccctttatacttaacctagtattttctacctttccccatctaaaataaaatttttataccactttctaattatgttgtgtgtgcccactttccccatacctactgctaccatcttagagtaggcaattttctcaagaggattattccaagaacaccctaatgttttcctgcttccagtcttctttcctcaaatttattccacactcttaagaattgaagatgtaaatctgtcactcgcctgaataaagcttcagtggcctctga

SEQ ID NO: 4496 - DNA, 796 bp, Homo sapiens
  source 1..796: mol_type = genomic DNA
gagcggcacagacgagatctcgatcgaaggcgagatggcggacgtgctagatcttcacgaggctgggggcgaagatttcgccatggatgaggatggggacgagagcattcacaaactgaaagaaaaagcgaagaaacggaagggtcgcggctttggctccgaggggtcccgagcgcggatgcgtgaggattatgacagcgtggagcaggatggcgatgaacccggaccacaacgctctgttgaaggctggattctctttgtaactggagtccatgaggaagccaccgaagaagacatacacgacaaattcgcagaatatggggaaattaaaaacattcatctcaacctcgacaggcgaacaggatatctgaaggggtatactctagttgaatatgaaacatacaaggaagcccaggctgctatggagggactcaatggccaggatttgatgggacagcccatcagcgttgactggtgttttgttcggggtccaccaaaaggcaagaggagaggtggccgaagacgcagcagaagtccagaccggagacgtcgctgacaggtcctctgttgtccaggtgttctcttcaagattccatttgaccatgcagccttggacaaataggactggggtggaacttgctgtgtttatatttaatctcttaccgtatatgcgtagtatttgagttgcgaataaatgttccatttttgttttctacatttaatgttactttcctgtcctaaaattgaaagttctaaagcatagcaaggctgtatggatcattgtgaagatacttct

SEQ ID NO: 4497 - DNA, 2827 bp, Homo sapiens
  source 1..2827: mol_type = genomic DNA
ccctctgcgacagtttcccgaggtacctagtgtctgagcggcacagacgagatctcgatcgaaggcgagatggcggacgtgctagatcttcacgaggctgggggcgaagatttcgccatggatgaggatggggacgagagcattcacaaactgaaagaaaaagcgaagaaacggaagggtcgcggctttggctccgaagaggggtcccgagcgcggatgcgtgaggattatgacagcgtggagcaggatggcgatgaacccggaccacaacgctctgttgaaggctggattctctttgtaactggagtccatgaggaagccaccgaagaagacatacacgacaaattcgcagaatatggggaaattaaaaacattcatctcaacctcgacaggcgaacaggatatctgaaggggtatactctagttgaatatgaaacatacaaggaagcccaggctgctatggagggactcaatggccaggatttgatgggacagcccatcagcgttgactggtgttttgttcggggtccaccaaaaggcaagaggagaggtggccgaagacgcagcagaagtccagaccggagacgtcgctgacaggtcctctgttgtccaggtgttctcttcaagattccatttgaccatgcagccttggacaaataggactggggtggaacttgctgtgtttatatttaatctcttaccgtatatgcgtagtatttgagttgcgaataaatgttccatttttgttttctacatttaatgttactttcctgtcctaaaattgaaagttctaaagcatagcaaggctgtatggatcattgtgaagatacttctagggactgaactctatgtatttcttttttttcttttttttgagatagagtcttgctgtgttacccagggtggattgcagctgatcatagctcactgcagcttcaaactcttgggctcaagccatccttctgcctcactgtccctagtagttgggattacaggcacatgccaccatgcccagctaaatttttaatatttttgtagagatggggtcttgctgtgttacctgggctagttatgtgagtttctatattagacatagtctcaagtttcaggtagggtttaaagtagagacactggtcagtatttcttttttggggggaactaggagagcaggagtagaagtgagatgttaagatcttatggcactaaagacttactattctgttcctacatactctgttaggatcagatagatgttatagaaatgccttttgtttctcctgcccttcttgatgtcacagttttttgtacttccagctgtctaaaggcatgaatctcctcttggagcattctcccagacccttctttagaagagtctatactaagttcttggtgccctcttcggcagccaagggtgaaggccccatagaggagaggatccaaaggagcattgaggaggcccaagaggaaaaggatgtggctcaggctgggagggacttcagttagcatggtgggggagaaccagtaccacatacccagtaggtaataaggtgtccagcagaggatgaaggtcagcaagataagcagggccagtctcagggcccggagacgaacacggggacaattgtcaaaggagcgggggagggcaaattcaccagcaggggctaggaatttagaaaatatactgtaattcagacactcagcttctgatctgagtatagggtgaattgatggaggggcatagctagtgagacagagctcacctcctacaaggaggagaatgttgcaaaccgttttccccttcccaacctgggactatatgatttcttacccccagggattatgatagaaatatgaagccaccaagtctagacttgatggtgttcaagaataaataatactgattgcctccctagtccttgtccagctaactcagctgtttataattgaagggattcaacaaaattatctctagcatcaggtgctagacatggttagaatctcaccatggtttagtgactggtagatagctattaggtaggtagataaataaatgatgctagaggcaacaggtctagggttaaggattaaggcctgggaattggagtctcaccatggctccccttccttgtctggggcctggacacactgaggacaatgcggctatagcagatggccatggcagtcagtggcagcagaaagaggcagcagaaggtgaagaggttataggtggtctcttgccattgagccttgaagctgcctttggtgacacactgagtgaaagggactgggccagctcagtggaccgtgtggaacaggaacagctggagtggagttgaggactattagaactggttcccctcaccacccaacctacccacctatgtcatactgtctcctcccaattcatccttaattccaagtgaagcagcacagtgctgagaaacagttcatccatggtgccatgttaaagaagttggaaatatatcttgaaaatcctatcttccttttaggcttgaatatgatgctgaacagtaagtttgttaaatcttggaacttaaaacaatcctgctttctcaagtactattctaacattgcgctttataagggatgatatttctaccacctcactcatatttttagctgaaatgattttcctggtatgtctgttattttgtggaaaaagaaatattgtgtaaaatgggtgctgccaaaattccaggccattttgcagggactctgaagtgacctttagtagtaatagtcttatgtgcagtaactataatggtaaagaatgttaaataataaaatttaacattttccaaatgct

SEQ ID NO: 4498 - DNA, 1948 bp, Homo sapiens
  source 1..1948: mol_type = genomic DNA
ctcgttgcgcagtagtgctagcggcttcgcggttcggtcctcgcacccggcagccgccactggtgctgagctgctaggaagcccctatcgccgagctcgttggagcttgaacccattgtcacccctccgactcaccggcccaaaaaaaaaaaaacatggttgaagcagatcgcccaggaaagctcttcattggtgggcttaatacggaaacaaatgagaaagctcttgaagcagtatttggcaaatatggacgaatagtggaagtactcttgatgaaagaccgtgaaagcccagcagacgctaaggatgcagccagagacatgaatggaaagtcattagatggaaaagccatcaaggtggaacaagccaccaaaccatcatttgaaagtggtagacgtggaccgcctccacctccaagaagtagaggccctccaagaggtcttagaggtggaagaggaggaagtggaggaaccaggggacctccctcacggggaggacacatggatgacggtggatattccatgaattttaacatgagttcttccaggggaccactcccagtaaaaagaggaccaccaccaagaagtgggggtcctcctcctaagagatctgcaccttcaggaccagttcgcagtagcagtggaatgggaggaagagctcctgtatcacgtggaagagatagttatggaggtccacctcgaagggaaccgctgccctctcgtagagatgtttatttgtccccaagagatgatgggtattctactaaagacagctattcaagcagagattacccaagttctcgtgatactagagattatgcaccaccaccacgagattatacttaccgtgattatggtcattccagttcacgtgatgactatccatcaagaggatatagcgatagagatggatatggtcgtgatcgtgactattcagatcatccaagtggaggttcctacagagattcatatgagagttatggtaactcacgtagtgctccacctacacgagggcccccgccatcttatggtggaagcagtcgctatgatgattacagcagctcacgtgacggatatggtggaagtcgagacagttactcaagcagccgaagtgatctctactcaagtggtcgtgatcgggttggcagacaagaaagagggcttcccccttctatggaaagggggtaccctcctccacgtgattcctacagcagttcaagccgcggagcaccaagaggtggtggccgtggaggaagccgatctgatagagggggaggcagaagcagatactagaaacaaacaaaactttggaccaaaatcccagttcaaagaaacaaaaagtggaaactattctatcataactacccaaggactactaaaaggaaaaattgtgttactttttttaaattccctgttaagttcccctccataatttttatgttcttgtgaggaaaaaagtaaaacatgtttaattttatttgactttcgcattgcttttcaacaagcaaatgttaaatgtgttaagacttgtactagtgttgtaactttccaagtaaaagtatcccctaaaggccacttcctatctgatttttcccagcaaatgaggcaggcaattctaagatcttccacaaaacatctagccatctaaaatggagagatgaatcattctacctatacaaacaagctagctattagagggtggttggggtatgctactcataagatttcagggtgtcttccaactgaaatctcaatgttctcagtacgaaaaacctgaaatcacatgcctatgtaaggaaagtgctattcacccagtaaacccaaaaaagcaaatggataatgctggccattttgcctttctgacatttccttgggaatctgcaagaacctcccctttcccttcccccaataagaccatttaagtgtgtgttaaacaactacagaatact

SEQ ID NO: 4499 - DNA, 2012 bp, Homo sapiens
  source 1..2012: mol_type = genomic DNA
ctcgttgcgcagtagtgctagcggcttcgcggttcggtcctcgcacccggcagccgccactggtgctgagctgctaggaagcccctatcgccgagctcgttggagcttgaacccattgtcacccctccgactcaccggcccaaaaaaaaaaaaacatggttgaagcagatcgcccaggaaagctcttcattggtgggcttaatacggaaacaaatgagaaagctcttgaagcagtatttggcaaatatggacgaatagtggaagtactcttgatgaaagaccgtgaaaccaacaaatcaagaggatttgcttttgtcacctttgaaagcccagcagacgctaaggatgcagccagagacatgaatggaaagtcattagatggaaaagccatcaaggtggaacaagccaccaaaccatcatttgaaagtggtagacgtggaccgcctccacctccaagaagtagaggccctccaagaggtcttagaggtggaagaggaggaagtggaggaaccaggggacctccctcacggggaggacacatggatgacggtggatattccatgaattttaacatgagttcttccaggggaccactcccagtaaaaagaggaccaccaccaagaagtgggggtcctcctcctaagagatctgcaccttcaggaccagttcgcagtagcagtggaatgggaggaagagctcctgtatcacgtggaagagatagttatggaggtccacctcgaagggaaccgctgccctctcgtagagatgtttatttgtccccaagagatgatgggtattctactaaagacagctattcaagcagagattacccaagttctcgtgatactagagattatgcaccaccaccacgagattatacttaccgtgattatggtcattccagttcacgtgatgactatccatcaagaggatatagcgatagagatggatatggtcgtgatcgtgactattcagatcatccaagtggaggttcctacagagattcatatgagagttatggtaactcacgtagtgctccacctacacgagggcccccgccatcttatggtggaagcagtcgctatgatgattacagcagctcacgtgacggatatggtggaagtcgagacagttactcaagcagccgaagtgatctctactcaagtggtcgtgatcgggttggcagacaagaaagagggcttcccccttctatggaaagggggtaccctcctccacgtgattcctacagcagttcaagccgcggagcaccaagaggtggtggccgtggaggaagccgatctgatagagggggaggcagaagcagatactagaaacaaacaaaactttggaccaaaatcccagttcaaagaaacaaaaagtggaaactattctatcataactacccaaggactactaaaaggaaaaattgtgttactttttttaaattccctgttaagttcccctccataatttttatgttcttgtgaggaaaaaagtaaaacatgtttaattttatttgactttcgcattgcttttcaacaagcaaatgttaaatgtgttaagacttgtactagtgttgtaactttccaagtaaaagtatcccctaaaggccacttcctatctgatttttcccagcaaatgaggcaggcaattctaagatcttccacaaaacatctagccatctaaaatggagagatgaatcattctacctatacaaacaagctagctattagagggtggttggggtatgctactcataagatttcagggtgtcttccaactgaaatctcaatgttctcagtacgaaaaacctgaaatcacatgcctatgtaaggaaagtgctattcacccagtaaacccaaaaaagcaaatggataatgctggccattttgcctttctgacatttccttgggaatctgcaagaacctcccctttcccttcccccaataagaccatttaagtgtgtgttaaacaactacagaatactaaataaaaagtttggccaaaaccaa

SEQ ID NO: 4500 - DNA, 671 bp, Homo sapiens
  source 1..671: mol_type = genomic DNA
gatgtttatttgtccccaagagatgatgggtattctactaaagacagctattcaagcagagattacccaagttctcgtgatactagagattatgcaccaccaccacgagattatacttaccgtgattatggtcattccagttcacgtgatgactatccatcaagaggatatagcgatagagatggatatggtcgtgatcgtgactattcagatcatccaagtggaggttcctacagagattcatatgagagttatggttggtgattttgctcattatggtcgtggagtgctgattgattcacagtagataaagctggcagtaagaaatgctaagagttgttgaagcagaaggcggctgattgtcaataagtcactacagttgcataagcagtgctgtcagaattggtttggtgcaggcaatagattttgccttcaggggttcctgtggatctgaggaaggcatcagtgttgattaacactcataactagggagtgactggtagttacttaaagcaagtaattgaccaaatggaaaaggggaagtaattaaggaaattggtaagtggaggtagtcaggaagttcttgtggttcttcacatagattttacagctttggctttcattttgtttagctaaagtcatggggacaactcttcaatttagaacttaag

SEQ ID NO: 4501 - DNA, 2052 bp, Homo sapiens
  source 1..2052: mol_type = genomic DNA
ggtccttcagcctcgttcccgggcagtataaagtttgctgtctcctttgttcgccctcgttgcgcagtagtgctagcggcttcgcggttcggtcctcgcacccggcagccgccactggtgctgagctgctaggaagcccctatcgccgagctcgttggagcttgaacccattgtcacccctccgactcaccggcccaaaaaaaaaaaaacatggttgaagcagatcgcccaggaaagctcttcattggtgggcttaatacggaaacaaatgagaaagctcttgaagcagtatttggcaaatatggacgaatagtggaagtactcttgatgaaagaccgtgaaaccaacaaatcaagaggatttgcttttgtcacctttgaaagcccagcagacgctaaggatgcagccagagacatgaatggaaagctcctgtatcacgtggaagagatagttatggaggtccacctcgaagggaaccgctgccctctcgtagagatgtttatttgtccccaagagatgatgggtattctactaaagacagctattcaagcagagattacccaagttctcgtgatactagagattatgcaccaccaccacgagattatacttaccgtgattatggtcattccagttcacgtgatgactatccatcaagaggatatagcgatagagatggatatggtcgtgatcgtgactattcagatcatccaagtggaggttcctacagagattcatatgagagttatggttggtgattttgctcattatggtcgtggagtgctgattgattcacagtagataaagctggcagtaagaaatgctaagagttgttgaagcagaaggcggctgattgtcaataagtcactacagttgcataagcagtgctgtcagaattggtttggtgcaggcaatagattttgccttcaggggttcctgtggatctgaggaaggcatcagtgttgattaacactcataactagggagtgactggtagttacttaaagcaagtaattgaccaaatggaaaaggggaagtaattaaggaaattggtaagtggaggtagtcaggaagttcttgtggttcttcacatagattttacagctttggctttcattttgtttagctaaagtcatggggacaactcttcaatttagaacttaagttgaattataaaaatgatggatataagtggtagctgtatctagtgaagtgtctgtcagtaagtgaaacattttttggtggtggcttatccacaaacagtttagttgtagaataaaacttatgagtgacatctggaaagtaaccatgctaagatggcaagcacactggaaacaattaggccacttggctttcttttgctgtattgttttataagcctactttacctcccagtcttggaaacaagttttagttttttattggtttggagactagagccaatagtataatgttctcaaaggaaacagacttgagttgttggattagaggaactaacccaacttatatgattttttttttgtttttgtcgtgtagttatggcactgtcttatttggaacatttgcaactagggataatacaacatttttaactctcatttgacaacctactactaatcacagaccacaagggtaatgaccaaatttatgtggtttttgcactccatagttgtcttagcccaatctttctatactcttacgattacttgggttaacgcttctgtgaggaccttctggctcttgagataccctaaatatttaagatatttagatatcttgaagatagtataggatatagagattgtaccaaataggaatataaggagtatgttaaaatgaccagatacctgtttgatagtttactgacctagcagatgtgtggaaaaggaatcagatcttgattcttctgggtttatactggttgtaaaacagaatgatacagaaaatgttttccttgtttaactggtagttgaacatagaacttgggtattatagatcacttttcactttttggaatgttttgtattgaaacttaataaaactttaacatgg

SEQ ID NO: 4502 - DNA, 1528 bp, Homo sapiens
  source 1..1528: mol_type = genomic DNA
gcgcatgcgctgcgctgcctttcccgggcgctgattcctgagtgctgagcgcgaacccgaggagatgaaccctttaactaaggtgaagctgatcaacgagctgaatgaacgagaggtccagcttggggtggccgataaggtgtcctggcactccgagtacaaggacagcgcctggatcttcctgggagggcttccttatgaactgactgaaggggacatcatctgtgtgttctcacaatatggggagattgttaacattaatctcgtgcgggacaagaaaactgggaaatccaaaggattctgtttcctctgctatgaagaccagaggagcacaattctggccgtcgacaattttaatgggatcaagatcaaaggaagaactatccgagtggatcatgtgtctaactatcgggctcctaaggactcagaagaaatagatgatgtgaccagacaactccaggagaagggctgtggggctcgtaccccctcaccaagtttgtctgagagctctgaagatgaaaaaccaacaaaaaagcacaaaaaagacaaaaaggaaaaaaagaaaaaaaagaaagaaaaagagaaagccgaccgggaggtacaggcagagcaaccatcctcttcgtcacccagacgcaagacagtaaaggaaaaggatgacactggccctaagaagcacagcagcaagaactcagagagagctcagaagtcagagcccagggaggggcagaagctccccaaatccaggacggcctactctggtggagcagaggacctagagagggagctgaagaaggagaaacccaagcacgagcacaagtcctcaagcaggagggaggcaagagaagaaaagaccaggattagggacagagggcggagctcagatgcacattctagctggtataatgggcgttctgaagggcgtagttatagaagtagaagtaggagccgagataaatcccataggcataaaagggcccgacgctcccgggagcgggagtcttcgaatcccagtgaccgttggcgtcactgaagacttcagctgcacagtagatttggaaataattatgttttttaaatgcagtcaaattcagttgggtggttactatttttgtatctaaaacttctggggctggattcttttaatcccttgactatttagagtcattgggagggctgcagtttcaacagctagatatcctggatattgtttgcaccatccattgtccctgtaccagagtatgtatcctgaactttggttcataaatatggctcttgaacccatagaccccagttgaagatggaattttcaggaaagggaaaatactagataattctagaattctagtcttcgtgttagatgtttatagcccagcatcttgggacctttccagttactaggtttggacagcttgatgtgaacgaatgggataggatttttaaaatcagccagctccatgcccaaaccttcctgtttgcagaactttttaatgtcttttctttttcattaaaacttttttgttcgata

SEQ ID NO: 4503 - DNA, 798 bp, Homo sapiens
  source 1..798: mol_type = genomic DNA
cctgagtgctgagcgcgaacccgaggagatgaaccctttaactaaggtgaagctgatcaacgagctgaatgaacgagaggtccagcttggggtggccgataaggtgtcctggcactccgagtacaaggacagcgcctggatcttcctgggagggcttccttatgaactgactgaaggggacatcatctgtgtgttctcacagtaagtgtcctttcatttcctgcctcctgagtcgacagagtactttgtttctgtaatacattttgtggcatcacaaaaaccacttattttcactctaggctgaatggcatccctgcatggggagggctggagcttctgttctagatcagtcccaggacatggttctagaatgttctgtgggagatccaagaggtttgttaatttgggagggcatcttggggatcctagtctatttctgttgtttttcactgaggcttgttcagcctgggcctagactggaacagactggactccttgggctcttgcaaactaggggtaacccatggtcacagggcccttctggcccttacctgtgtggcgtcatacgattggggcaaagcacagaggaaattggggtaaaaaacagaaggtcgtagtttgctttctttgtttctcgatgagtgtaaggttagtgagcaaaggcaatctctgcctggaggctgagaatcacagcccgaagggaacaagaatgaataggagacctgtatattcttcattctgctgaggtgttagcagcagcatttcatgggagagggtgttggcagctcatactggtag

SEQ ID NO: 4504 - DNA, 1523 bp, Homo sapiens
  source 1..1523: mol_type = genomic DNA
gcgcatgcgctgcgctgcctttcccgggcgctgattcctgagtgctgagcgcgaacccgaggagatgaaccctttaactaaggtgaagctgatcaacgagctgaatgaacgagaggtccagcttggggtggccgataaggtgtcctggcactccgagtacaaggacagcgcctggatcttcctgggagggcttccttatgaactgactgaaggggacatcatctgtgtgttctcacaatatggggagattgttaacattaatctcgtgcgggacaagaaaactgggaaatccaaaggattctgtttcctctgctatgaagaccagaggagcacaattctggccgtcgacaattttaatgggatcaagatcaaaggaagaactatccgagtggatcatgtgtctaactatcgggctcctaaggactcagaagaaatagatgatgtgaccagacaactccaggagaagggctgtggggctcgtaccccctcaccaagtttgtctgagagctctgaagatgaaaaaccaacaaaaaagcacaaaaaagacaaaaaggaaaaaaagaaaaaaaagaaagaaaaagagaaagccgaccgggaggtacaggcagagcaaccatcctcttcgtcacccagacgcaagacagtaaaggaaaaggatgacactggccctaagaagcacagcagcaagaactcagagagagctcagaagtcagagcccagggaggggcagaagctccccaaatccaggacggcctactctggtggagcagaggacctagagagggagctgaagaaggagaaacccaagcacgagcacaagtcctcaagcaggagggaggcaagagaagaaaagaccaggattagggacagagggctcagatgcacattctagctggtataatgggcgttctgaagggcgtagttatagaagtagaagtaggagccgagataaatcccataggcataaaagggcccgacgctcccgggagcgggagtcttcgaatcccagtgaccgttggcgtcactgaagacttcagctgcacagtagatttggaaataattatgttttttaaatgcagtcaaattcagttgggtggttactatttttgtatctaaaacttctggggctggattcttttaatcccttgactatttagagtcattgggagggctgcagtttcaacagctagatatcctggatattgtttgcaccatccattgtccctgtaccagagtatgtatcctgaactttggttcataaatatggctcttgaacccatagaccccagttgaagatggaattttcaggaaagggaaaatactagataattctagaattctagtcttcgtgttagatgtttatagcccagcatcttgggacctttccagttactaggtttggacagcttgatgtgaacgaatgggataggatttttaaaatcagccagctccatgcccaaaccttcctgtttgcagaactttttaatgtcttttctttttcattaaaacttttttgttcgata

SEQ ID NO: 4505 - DNA, 5084 bp, Homo sapiens
  source 1..5084: mol_type = genomic DNA
gtggcccccaccccttccctcctccatttccatccattccgcgatcgcggcggaccccaccgtcatcgcgcgccgtgagtcacactccacagccaatccctggccacatccgggctcgcccccgccccgcccccttgttcccgcaagcccggaactgcccaaatcccgcccctcccctcccaaaaaaacacccctcatccagtctcttccagcctagagatcctggcctacccctccgccaaagcgcgcactgagtgcaaaccccagagtcaatccctgtcccggctccgccccccgcgtccgaatcccgcccagccgggccctcaagcccagtcgggactcgagcctagggaggcgaggttcccgcaccggatagcatgtttttggcccagaggagcctctgctctcttagcggtagagcaaaattcctgaagacaatttcttcttccaaaatcctcggattctctacttctgctgaacattctgttgttttcctctgccatctagtggcaaaagaaagtaattttcctggttttttgaatggatagccataccttaaaaagcatccagattgcgcagtagtgctagcggcttcgcggttcagtcctcctaactgacagccgccactggtgctgagctgctaggaagcccctgtcggcgagcttgttggagcttgaacccactgtcacccctccgactcaccggcaaaaaaaaaaatggttgaagcagatcgcccaggaaagctcttcattggtgggcttaatacggaaacaaatgagaaagctcttgaaacagtatttggcaaatatggacgaatagtggaagtactcttgataaaagaccgtgaaaccaacaaatcaagaggatttgcttttgtcacctttgaaagcccagcagacgctaaggatgcagccagagacatgaatggaaagtcattagatggaaaagccatcaaggtggaacaagccaccaaaccatcatttgaaagaggtagacatggaccgcccccacctccaagaagtagaggtcctccaagaggttttggagctggaagaggaggaagtggaggaaccaggggacctccttcacgaggaggacacatggatgatggtggatattccatgaattttaacatgagttcttccaggggaccactcccagtaaaaagaggaccaccaccaagaagtgggggtccttctcctaagagatctgcaccttcaggactagttcgcagcagcagtggaatgggaggaagagctcctctatcacgtggaagagatagttatggaggtccacctcgaagggaaccgctcccctctcgtagagatgtttatttgtccccaagagatgatgggtattctactaaagacagctattcaagcagagattacccaagttctcgtgatacaagagattatgcaccaccaccacgagattatacttaccgtgattatggtcattccagttcacgtgatgactatccatcaagaggctatggcgatagagatggatatggtcgtgatcgtgactattcagatcatccaagtggaggttcctacagagattcatatgagagttatggtaactcacgtagtgctccacttacacgagggcccccgccatcttatggtggaagcagtcgctatgatgattatagcagctcacgtgatggatatggtggaagtcgagacagttactcaagcagccgaagtgatctctactcaagttgtgacagggttggcagacaagaaagagggcttcccccttctgtagaaagggggtacccttcttcacgtgattcctacagcagttcaagccgcggagcaccaagaggtgctggccctggaggaagccgatctgatagagggggaggcagaagcagatactagaaacaaacaaaactttggaccaaaatcccagttcaaagaaacaaaaaaaagagtggaaactattctatcataactacccaaggactactaaaaggaaaaattgtgttaccttttttaaattccctgttaagtcccttccgtaatttttatgttcttgtgaggaaaaaagtaaaacatgtttaattttatttgactttatgacattgcttttcaacaagcaaatgttaaatgtgttaagccttgtagtactagtgttgtaactttccaagtaaaggtgtccctaaagaccacttcctatctggtttttcccagtaaatgaggcaagcaattctaagatcttccacaaaacatctagccaactaaaatggagagatgaatcattctgcctatacaaacaagctagctattagagggtggttggagtatgctactcataagatttcagggtgttttctaactgaaatctcactgttctcagtatgcaaaacctgaaatcagatgcctatgtaaggaaagtgctattcacccagtaaacccaaaaaaagcaaatggataatgctggccattttgcctttctgacatttccttgggaatctgcaagaacctcccctttcccctcccacaataagaccatttaagtgtgtgctaaacaactacggaatactaaataaaaagtttggccaaaaccaaccatgaagctgcaaaggtgcttgctcttactctttcaaatttttgcaactctaatgtctcacttttaaaggaacagcttgattgcaaaggagaaaatagataagcaatgaatttatctccaacttcctaaaggcttatgacttctaaaaagtgaatctatcagcattccacatcagatttaaagcatcaaatgcctgtgaaacagcaaagatggttgaagattgtgctcattatgtttgtggagtgctgattgattcacagtagataacgctggcagtaagagaaatcaaatgctaagagttgttgaagcagaaggcggctgattgttggtaagtcagtgcagttgcataagcagtgctgtcagaattggtttggtgcaggcaatagattttgccttcaagggttcctgtggatctcaggaaggcatcagtgttgattaacactcataactagggagtgagtggtagttacttaagtaattgaccaaatggaaaaggggaagtaattaaggaaattggtaagtggaggtagtcaggaggttctcgtggtcctttacacagattttacagctttgggtttcattttgtttagctaaagtcatggggacaactcttcaatttagaacttaagatgaattataaaaatgatggatataagtggtagctctatctggtgaagtgtcttgtcagtaagtgaaacatttttttgtggtggcttatccacaaacagtttagttgtagaataaaacttatgagtgacatctggaaagtaacaaccatgctaagatggcaaacacactggaaacaattgggccacttggctttcttttgctgtattgttttataagcctgctttacctccccgtcttggaaacaagttttagtttattgctttggagactagagccaatagtgtaatgttctcaaaggaaacagacttgagttgttggattagaggaactaactcaacttctaattttttttgttgtaattatggcactgtcatgttttaacatttgcaactagggatagtaagtacaacatttttaactctcatttggcagactactactaatcacagaccacaagggtaatgaccaaatttatgtggttgttacacttccatagttgtcttagccgaatccttccatattcttatgattacttgggttaaagcttctgtgaggaccttttggctcttaagatatcctaaatatttaaaatatttagatatcctaaatataggatatagagtttgtaccaaatatgaatgaatattgttcaaagcaaggagtatgttaaaatgaccagacacctgtttgataaatagtttactgaactagcagacgtgtggaaaaagaatcagatcttgattcttctgggtttatactggttgtaaaacagaatgatattagaaaatgttttccttgtttaagtggtagttgaacatagaacttgggtattatagatcacttttcactttttggaatgttttgtattgaaacttaatacaactttaacatggcaaaaaaaaaaaaaatccaaaatctatgagataattttgttaaagttggcttgcttgggcgggtgcttggtccagagggagaaaagaaggcatgatttcagaatactctggcagctttttaaattcagctttatcaagttacagtaaactgtatctgtttagaattacaactcaatggttattttgacagatgtatatgccatgaagccactgtcaccatcaacatgcagaacacttccatcgcccccaaaagattcctcaagttcctttgcagtccatccctcacgctgctgatttgtctttgtcaccatatattagtttgctttgtggtggtgtttagtattttatataaatgggattgtgtagcatgtacttttttgtttatggtttctttcacacacaatgactttgaaattcaccaggttgcagtgtatcagtagcttattccttttattgctgagtagtgtcccattatgtgaatatgccattatttgtttttctactcacctgttgatggaccttgggattgtttccagtttggggctactgtgaataaaactgttaggaacatttgtgtacaagccactgtgtagacataggttttcctttctcttgggtaaatacctaccagtaaaatggttgggttgcatggcagatttatgtttaataaagtaactgccaaactgtttgttttccaaaggggctatacccttttatattcccaccagggttgtatagagttccaactgccaacactcagttttcagccattctgatgggaatctagtggtatctcattgtggttttattttcatttccccgggtgactaatgctggtaagcatcttttaaggtactttttggccagttgtatattttctgtgaagtggctgtcaaatcttttgcccacttttaattggattgtttgtcttattgagttgtaaaagttctttatatatactgtattaaagtcctttgtaag

SEQ ID NO: 4506 - DNA, 4799 bp, Homo sapiens
  source 1..4799: mol_type = genomic DNA
cacccctcatccagtctcttccagcctagagatcctggcctacccctccgccaaagcgcgcactgagtgcaaaccccagagtcaatccctgtcccggctccgccccccgcgtccgaatcccgcccagccgggccctcaagcccagtcgggactcgagcctagggaggcgaggttcccgcaccggataggaacattctgttgttttcctctgccatctagtggcaaaagaaagtaattttcctggttttttgaatggatagccataccttaaaaagcatccagattgcgcagtagtgctagcggcttcgcggttcagtcctcctaactgacagccgccactggtgctgagctgctaggaagcccctgtcggcgagcttgttggagcttgaacccactgtcacccctccgactcaccggcaaaaaaaaaaatggttgaagcagatcgcccaggaaagctcttcattggtgggcttaatacggaaacaaatgagaaagctcttgaaacagtatttggcaaatatggacgaatagtggaagtactcttgataaaagaccgtgaaaccaacaaatcaagaggatttgcttttgtcacctttgaaagcccagcagacgctaaggatgcagccagagacatgaatggaaagtcattagatggaaaagccatcaaggtggaacaagccaccaaaccatcatttgaaagaggtagacatggaccgcccccacctccaagaagtagaggtcctccaagaggttttggagctggaagaggaggaagtggaggaaccaggggacctccttcacgaggaggacacatggatgatggtggatattccatgaattttaacatgagttcttccaggggaccactcccagtaaaaagaggaccaccaccaagaagtgggggtccttctcctaagagatctgcaccttcaggactagttcgcagcagcagtggaatgggaggaagagctcctctatcacgtggaagagatagttatggaggtccacctcgaagggaaccgctcccctctcgtagagatgtttatttgtccccaagagatgatgggtattctactaaagacagctattcaagcagagattacccaagttctcgtgatacaagagattatgcaccaccaccacgagattatacttaccgtgattatggtcattccagttcacgtgatgactatccatcaagaggctatggcgatagagatggatatggtcgtgatcgtgactattcagatcatccaagtggaggttcctacagagattcatatgagagttatggtaactcacgtagtgctccacttacacgagggcccccgccatcttatggtggaagcagtcgctatgatgattatagcagctcacgtgatggatatggtggaagtcgagacagttactcaagcagccgaagtgatctctactcaagttgtgacagggttggcagacaagaaagagggcttcccccttctgtagaaagggggtacccttcttcacgtgattcctacagcagttcaagccgcggagcaccaagaggtgctggccctggaggaagccgatctgatagagggggaggcagaagcagatactagaaacaaacaaaactttggaccaaaatcccagttcaaagaaacaaaaaaaagagtggaaactattctatcataactacccaaggactactaaaaggaaaaattgtgttaccttttttaaattccctgttaagtcccttccgtaatttttatgttcttgtgaggaaaaaagtaaaacatgtttaattttatttgactttatgacattgcttttcaacaagcaaatgttaaatgtgttaagccttgtagtactagtgttgtaactttccaagtaaaggtgtccctaaagaccacttcctatctggtttttcccagtaaatgaggcaagcaattctaagatcttccacaaaacatctagccaactaaaatggagagatgaatcattctgcctatacaaacaagctagctattagagggtggttggagtatgctactcataagatttcagggtgttttctaactgaaatctcactgttctcagtatgcaaaacctgaaatcagatgcctatgtaaggaaagtgctattcacccagtaaacccaaaaaaagcaaatggataatgctggccattttgcctttctgacatttccttgggaatctgcaagaacctcccctttcccctcccacaataagaccatttaagtgtgtgctaaacaactacggaatactaaataaaaagtttggccaaaaccaaccatgaagctgcaaaggtgcttgctcttactctttcaaatttttgcaactctaatgtctcacttttaaaggaacagcttgattgcaaaggagaaaatagataagcaatgaatttatctccaacttcctaaaggcttatgacttctaaaaagtgaatctatcagcattccacatcagatttaaagcatcaaatgcctgtgaaacagcaaagatggttgaagattgtgctcattatgtttgtggagtgctgattgattcacagtagataacgctggcagtaagagaaatcaaatgctaagagttgttgaagcagaaggcggctgattgttggtaagtcagtgcagttgcataagcagtgctgtcagaattggtttggtgcaggcaatagattttgccttcaagggttcctgtggatctcaggaaggcatcagtgttgattaacactcataactagggagtgagtggtagttacttaagtaattgaccaaatggaaaaggggaagtaattaaggaaattggtaagtggaggtagtcaggaggttctcgtggtcctttacacagattttacagctttgggtttcattttgtttagctaaagtcatggggacaactcttcaatttagaacttaagatgaattataaaaatgatggatataagtggtagctctatctggtgaagtgtcttgtcagtaagtgaaacatttttttgtggtggcttatccacaaacagtttagttgtagaataaaacttatgagtgacatctggaaagtaacaaccatgctaagatggcaaacacactggaaacaattgggccacttggctttcttttgctgtattgttttataagcctgctttacctccccgtcttggaaacaagttttagtttattgctttggagactagagccaatagtgtaatgttctcaaaggaaacagacttgagttgttggattagaggaactaactcaacttctaattttttttgttgtaattatggcactgtcatgttttaacatttgcaactagggatagtaagtacaacatttttaactctcatttggcagactactactaatcacagaccacaagggtaatgaccaaatttatgtggttgttacacttccatagttgtcttagccgaatccttccatattcttatgattacttgggttaaagcttctgtgaggaccttttggctcttaagatatcctaaatatttaaaatatttagatatcctaaatataggatatagagtttgtaccaaatatgaatgaatattgttcaaagcaaggagtatgttaaaatgaccagacacctgtttgataaatagtttactgaactagcagacgtgtggaaaaagaatcagatcttgattcttctgggtttatactggttgtaaaacagaatgatattagaaaatgttttccttgtttaagtggtagttgaacatagaacttgggtattatagatcacttttcactttttggaatgttttgtattgaaacttaatacaactttaacatggcaaaaaaaaaaaaaatccaaaatctatgagataattttgttaaagttggcttgcttgggcgggtgcttggtccagagggagaaaagaaggcatgatttcagaatactctggcagctttttaaattcagctttatcaagttacagtaaactgtatctgtttagaattacaactcaatggttattttgacagatgtatatgccatgaagccactgtcaccatcaacatgcagaacacttccatcgcccccaaaagattcctcaagttcctttgcagtccatccctcacgctgctgatttgtctttgtcaccatatattagtttgctttgtggtggtgtttagtattttatataaatgggattgtgtagcatgtacttttttgtttatggtttctttcacacacaatgactttgaaattcaccaggttgcagtgtatcagtagcttattccttttattgctgagtagtgtcccattatgtgaatatgccattatttgtttttctactcacctgttgatggaccttgggattgtttccagtttggggctactgtgaataaaactgttaggaacatttgtgtacaagccactgtgtagacataggttttcctttctcttgggtaaatacctaccagtaaaatggttgggttgcatggcagatttatgtttaataaagtaactgccaaactgtttgttttccaaaggggctatacccttttatattcccaccagggttgtatagagttccaactgccaacactcagttttcagccattctgatgggaatctagtggtatctcattgtggttttattttcatttccccgggtgactaatgctggtaagcatcttttaaggtactttttggccagttgtatattttctgtgaagtggctgtcaaatcttttgcccacttttaattggattgtttgtcttattgagttgtaaaagttctttatatatactgtattaaagtcctttgtaagaca

SEQ ID NO: 4507 - DNA, 2215 bp, Homo sapiens
  source 1..2215: mol_type = genomic DNA
aacagccgaccaatcacaggcagcaggggcgcgccctgcagcggggctccggctgcggttccgtggactcggcgactaggcgccgcctgaccagtaggagccgccctcgacgagcgagctcgaaggctgcgactggcgccgcctcaccgcctcccaccgccactgaccgaccgttcgaccggcaaacatggttgaagcggatcgcccggggaagctgttcattgggggcctcaacctcgaaaccgacgagaaagccctcgaagccgagtttggcaagtatggccgcatcgtcgaggtgctcctgatgaaagaccgagaaaccaacaagtcgaggggcttcgcgttcgtcacctttgaaagccccgcagacgccaaggccgccgccagagacatgaacggcaagtccctggatggtaaggccatcaaggtggcccaggccaccaaaccggcgttcgagagcagccggcggggcccgccgcctccccgcagccgcggtcgcccgaggttcctgcgcggaacccgcgggggtggcggcggcccgcggcgttccccatcccggggcgggcccgatgatgacggcggctacacggcggatttcgacctgcggccctccagggccccgatgcccatgaagcgtgggccgccgccgcgcagggtcggcccaccccccaagagggccgcgccgtcgggcccggctcgcagcagcggcggtggaatgcgcgggagggccctggccgtgcgggggcgagacggctactcaggcccaccgcgccgggagccgctgcccccgcgccgcgacccctacctgggcccgcgggatgagggctactcgtccagagacggctactcgagccgagactaccgcgaaccccggggttttgccccctcgcccggagagtacacccaccgcgattacggccactccagtgtccgggacgactgtcccttgagaggctacagcgaccgagacggctacggaggtcgcgaccgtgactacggggatcatctgagcagaggctcccatcgagagccctttgagagctacggagagctgcgcggcgccgccccaggacgggggacaccgccatcttacggaggaggaggccgctacgaggagtaccggggctactcacccgatgcctacagcggcggccgcgacagttacagcagcagttatggccggagcgaccgctactcgaggggccgacaccgggtgggcagaccagatcgtgggctctctctgtccatggaaaggggctgccctccccagcgtgattcttacagccggtcaggctgcagggtgcccaggggcggaggccgtctaggaggccgcttggagagaggaggaggccggagcagatactaagcaggaacagacttgggaccaaaaatcccttttcaacgaaactaacaaaaagaagaacctgttgtatggtaactacccaaggactagtacaaggaagagttgtttttaccttttaagaatttcctgttaagatcgtctccatttttatgcttttgggagaaaaaacttaaaattcgtttagtttagttttggaattgttaacgtttctttcaacaagctcctgttaaaagtatatgaacctgagtactagtcttcttacatttacaagtagaaattcgattaatggcttcttcccttgtaaattttcttgataaatgaggcaaacagttctaagatctttgataaacatctgctcacctaaaatggaaaaacggatcattctgctcatttaaaccaactagattttgggtggagagtgggagggattggtgtatgctactcttaagatttcagggtatctttcaaactgaatctttgtttccagtattaaaaagcaaacaaccagcaacaacaacaacaaaagtgatttagatcaaatgtttatgtaaagaaaattattttcactcagtaaatctgaaaagtaaatggataatgttggccatgttttgcctttttgctttttctttgggaatctacaggatcacctgtcccctcactcccaaaagtactatctatgttttgaacaacagtggaatactatatcaaaggtttggccaaccaaccacaaagctacaaaacaagcaaatcccaaatccttcaattgatagcattcattttcactaccaacaaatttattaagaaacaagtagaaaataaatcagtggtcgacttggggaccgtaatggcttc

SEQ ID NO: 4508 - DNA, 3469 bp, Homo sapiens
  source 1..3469: mol_type = genomic DNA
atcacttcccacttcctctgacccaccattcggcagggagacatgatggaagcggatcgcccagagaagcttttcattgggggcctcaacctcaaaaccgacgagaaagccctcaaagccgagtttggcaagtatggccacatcatcaaggtgttcctgatgaaagaccgaaaaaccaacaagtcgaggggcttcgcgttcgtcaccttcgaaagccctgcagacgccaaggctgccgccagagatatgaacggcaagtacctggatggtaaggccatcatggtggcccagaccatcaaaccggcattcaagagcagccgatgggtcccgccaacccccggcagcggcagtcgctcaaggttctcacacagaacccgtgggggtggcagcagcccacagcgacccccctctcagggcaggcctgatgacggccgcggctacgcggggtatttcgacctgtggccctacagggccccgatgcccaggaagcgcgggccgccaccgcggcactgggccagcccaccccacaagagggccacgccgtcgagcctggctcacagcgttggctgtggaatgcgcgggaaggcaccgactgtgtcggggcaagatggctactcaggcttgcagccacggcgctgggccggcccaccccacaagagggctgtgccccggtcaagcctggctcgcattggcggcagtggaatgcctgggaaggccccggccgtgtgggggcaagatggctactcaggcccgcgggtccgggagccactgcccccgtgccgcgaccctggggattttgtccctgcgctcagagactacagccgccgctattatggccactccagtgtcccggactaccgtcccttgagaggcgacggcaaccaaaatggctacaggggtcgcgaccatgagtacacagatcatcccagcaaaggctcctaccgagagcccctcaagagctacggaggcccatgcggcgctgcccctgtgtgggggacaccgccatcttatggaggaggatgccgctacgaggagtaccagggcaactcgcccgatgcctgcagtgaaggccgctcgtccgaggccttgccagtcgtcttgccagacgcctacagcagggaccactcgcccaaagcctatagtgggggccgcagcagttccagtaacggttacagccggagtgaccgctacggagaagaaggctgctacgaggagtacagaggccgctcgcccgacgcccacagcgggggccgcaacagttccagcaacagttacggccagagccaccactatggaggagaaggccgctatgaggagtaccgaggccgctcacacgaggcccgcagcgggggccgctccactgatgcccacagcaggggccggtccgacgacgcctacagtgggggccatgacagttccagctggagcgactgctgcggaggaggaggccgttatgaggagtaccaaggccgctcgctggatgccaacagtggaggctgctcgcccgaggcctacagtgggggccacgacaattccagctggagcgaccgctacggagtaggaggccactatgaggagaaccgaggccactctctggatgccaacagcggaggccgttcacccgacacccacagtgggggccacagcagttccagcaacagttacggccagagccaccgctatggaggagaaggccgctatgagtaccgaggccgctcgcatgacgcccacagtgggggctgctctgccgacgcctacagtgggggccacgacagttccagccagagcaaccgctacggaggaggaggctgctacgaggagtaccgaggccgctccctcgatgccaacagtggaggccgctcgcccaatgcctacagcgggggccacgacagttccagctggagccaccgctacggaggaggaggccgctacgaggagtaccgaggccgctcccttgatgccaacagtggaggccgctcgcctgatgcctacagtgggggccacgacagttctggccagagcaactgctacggaggaggaggccgctacgaggagtaccgaggccgcttgctcgatgccaacagtggaggccgctcgcctgatgcctacagtgggggccacgacagttccagccagagcaaccgctatggaggaggcggccgctacgaggagtaccgaggccactcgcttgatgccaacagcggaggccgctcgcctgacacctacagccggggccacgacagttccagccagagcgaccactatggaggaggaggtcgctcactcgatgccaacagcagtggccgcttgcctgacgcctacagtgggggccatgacagttccagccggagccaccgctacggaggaggaggccgctacgaggagtaccgaggccgctcgctcgatgccaacagcggaggccgctcacccaatgcctacagcgggggccacaacagttccagccggaacgacccctgcagaggaggaggccgctacgaggagaaccgaggtcactctctcgatgccaacagcggaggccactcacccaacgcctacagtgggggccgtgacagttccagcaacagttacgaccggagccaccgctatggaggaggaggccactacgaagagtaccgaggccgctcgcacgacacccacagcaggggccgatcgcccgatgcccacagcggggaccactacaccgaagcctacagcaggggccgcgacagtttcagcaacagctatggccggagtgaccattacggaagaggaggctgctacgaggaataccaaggccgctcgcccaatgcctacggcgggggccgcggcctcaacagttccaacaacagtcatggccggagccaccgctacggaggaggaggccgctacgaggagtaccgaggcccctcgcctgacgcccacagtgggggccgcgacagttccatcaagagttacggcctgagcgaccgctacggaggaggaggccactacgaggagtaccagggcagcttgcctgacgcctacagcggcgaccacgacagatccagcaacagttacggccggagcgaccgctactcgaggggtcgagaccgggtaggcagaccggatcgtgggctccctctgcccatggaaacgggcagccctcccctgcatgattcttacagccggtcaggctgcagggtgcccaggggcggaggccgtcaaggaggccgcttcgagaggggggaaggccggagcagatactaagcaggaacagacttgggcccaaaaattccttttcaaagaaacaaaaagaagaacctgttctatgttaactacccaaggactagtataagtaggagttgtttttaccttttaagaatttcctgttaagatctccatttttatgcttttgtgaggaaaaacttaaaattagtttgaaattgttaatgtttctttcaacaagttcttgttaaaagtataagatatg

SEQ ID NO: 4509 - DNA, 1921 bp, Homo sapiens
  source 1..1921: mol_type = genomic DNA
atttccgggcacggcttccggcgtccttccctctcagggaagctccagctgtccctcccgcagttggccctgtggtgttccgaagccggttacgtacggcctgagggccaggcgaacctcaggctctttgtcctactaaaaagcgcagcacaatggtagaagcagatcatcctggcaagcttttcattggtggcctcaatagagaaaccaatgagaagatgcttaaagcagtatttgggaaacatggtcccatatcagaagttcttttgataaaggatcgaaccagcaaatccagaggctttgcatttattacttttgagaaccctgcagatgctaagaatgctgccaaagatatgaatggaaagtctttgcatggaaaagcaataaaagtagaacaagccaagaaaccatcttttcaaagtggtggtaggcggagaccaccagcttcttcgagaaacagaagcccttcaggaagtctgagatctgcaagaggaagccgtggaggaacaagagggtggcttccctcacatgaagggcacctggatgatggtggatacactcctgatctcaagatgagttattctaggggactcattccagttaaaagaggtccatcttcaagaagtggaggtcctcctccgaaaaaatctgctccttctgctgtggcaagaagcaatagttggatgggaagccaaggtcccatgtcacaaagaagagagaattatggagttcctccacgcagagcgacaatatcttcctggagaaatgatcgcatgtcaacaagacatgatggttatgcaactaacgatggaaatcatccaagttgccaagaaacgagggattatgctccaccatctagaggctatgcataccgtgataatggtcattctaatcgggatgaacattcctctagaggatatagaaatcatcgaagttcccgagaaactagggattatgctccaccatctagaggccatgcataccgtgattatggtcattctcgtcgggatgaaagttattctagaggatacagaaatcgtcgaagttcccgagaaactagggagtatgctccaccatctagaggccatggataccgtgattatggtcattctcgtcgacatgaaagttattctagaggatatagaaatcatccaagttcccgagaaaccagggattatgctccaccacatagagactatgcataccgtgattatggtcattctagttgggatgaacattcctctagaggatatagttatcatgatggctacggtgaggcccttggtagagatcattctgaacatctaagtggaagttcttatagagatgcacttcagagatacgggacctctcatggtgcaccacctgcaagagggcctcggatgtcttatggtggaagcacctgccacgcatatagtaatacacgagatagatatggcagaagttgggagagttactcgagctgtggtgattttcattattgtgatcgtgagcatgtttgcagaaaagaccaaaggaatccgccttctctgggtagggtgctccctgatcctcgtgaagcatgtggtagctcaagttatgtggcatctatagtagatggtggggagagtcgatctgaaaaaggagactcgagcagatattaaagcaagcattgaaaataatagttattgcataccaatccttgtttgcaaatcaaaaattgaaatgttatttctgcattgttacctgcatattactgaaagaaacatgttggttttgtggagagaggtagatactaacttcctccatgaattttttgaggtattcaaaggaaaaggaattgttttcaaagtaatttcatacttgttgatgctatttgaaaagtgtttagatgtaatatctaccttaaaattttcacaataaaatttgacatgtactgcaa

SEQ ID NO: 4510 - DNA, 1885 bp, Homo sapiens
  source 1..1885: mol_type = genomic DNA
cagggaagctccagctgtccctcccgcagttggccctgtggtgttccgaagccggttacgtacggcctgagggccaggcgaacctcaggctctttgtcctactaaaaagcgcagcacaatggtagaagcagatcatcctggcaagcttttcattggtggcctcaatagagaaaccaatgagaagatgcttaaagcagtatttgggaaacatggtcccatatcagaagttcttttgataaaggatcgaaccagcaaatccagaggctttgcatttattacttttgagaaccctgcagatgctaagaatgctgccaaagatatgaatggaaagtctttgcatggaaaagcaataaaagtagaacaagccaagaaaccatcttttcaaagtggtggtaggcggagaccaccagcttcttcgagaaacagaagcccttcaggaagtctgagatctgcaagaggaagccgtggaggaacaagagggtggcttccctcacatgaagggcacctggatgatggtggatacactcctgatctcaagatgagttattctaggggactcattccagttaaaagaggtccatcttcaagaagtggaggtcctcctccgaaaaaatctgctccttctgctgtggcaagaagcaatagttggatgggaagccaaggtcccatgtcacaaagaagagagaattatggagttcctccacgcagagcgacaatatcttcctggagaaatgatcgcatgtcaacaagacatgatggttatgcaactaacgatggaaatcatccaagttgccaagaaacgagggattatgctccaccatctagaggctatgcataccgtgataatggtcattctaatcgggatgaacattcctctagaggatatagaaatcatcgaagttcccgagaaactagggattatgctccaccatctagaggccatgcataccgtgattatggtcattctcgtcgggatgaaagttattctagaggatacagaaatcgtcgaagttcccgagaaactagggagtatgctccaccatctagaggccatggataccgtgattatggtcattctcgtcgacatgaaagttattctagaggatatagaaatcatccaagttcccgagaaaccagggattatgctccaccacatagagactatgcataccgtgattatggtcattctagttgggatgaacattcctctagaggatatagttatcatgatggctacggtgaggcccttggtagagatcattctgaacatctaagtggaagttcttatagagatgcacttcagagatacgggacctctcatggtgcaccacctgcaagagggcctcggatgtcttatggtggaagcacctgccacgcatatagtaatacacgagatagatatggcagaagttgggagagttactcgagctgtggtgattttcattattgtgatcgtgagcatgtttgcagaaaagaccaaaggaatccgccttctctgggtagggtgctccctgatcctcgtgaagcatgtggtagctcaagttatgtggcatctatagtagatggtggggagagtcgatctgaaaaaggagactcgagcagatattaaagcaagcattgaaaataatagttattgcataccaatccttgtttgcaaatcaaaaattgaaatgttatttctgcattgttacctgcatattactgaaagaaacatgttggttttgtggagagaggtagatactaacttcctccatgaattttttgaggtattcaaaggaaaaggaattgttttcaaagtaatttcatacttgttgatgctatttgaaaagtgtttagatgtaatatctaccttaaaattttcacaataaaatttgacatgtactgc

SEQ ID NO: 4511 - DNA, 1767 bp, Homo sapiens
  source 1..1767: mol_type = genomic DNA
atggtagaagcagatcatcctggcaagcttttcattggtggcctcaatagagaaaccaatgagaagatgcttaaagcagtatttgggaaacatggtcccatatcagaagttcttttgataaaggatcgaaccagcaaatccagaggctttgcatttattacttttgagaaccctgcagatgctaagaatgctgccaaagatatgaatggaaagtctttgcatggaaaagcaataaaagtagaacaagccaagaaaccatcttttcaaagtggtggtaggcggagaccaccagcttcttcgagaaacagaagcccttcaggaagtctgagatctgcaagaggaagccgtggaggaacaagagggtggcttccctcacatgaagggcacctggatgatggtggatacactcctgatctcaagatgagttattctaggggactcattccagttaaaagaggtccatcttcaagaagtggaggtcctcctccgaaaaaatctgctccttctgctgtggcaagaagcaatagttggatgggaagccaaggtcccatgtcacaaagaagagagaattatggagttcctccacgcagagcgacaatatcttcctggagaaatgatcgcatgtcaacaagacatgatggttatgcaactaacgatggaaatcatccaagttgccaagaaacgagggattatgctccaccatctagaggctatgcataccgtgataatggtcattctaatcgggatgaacattcctctagaggatatagaaatcatcgaagttcccgagaaactagggattatgctccaccatctagaggccatgcataccgtgattatggtcattctcgtcgggatgaaagttattctagaggatacagaaatcgtcgaagttcccgagaaactagggagtatgctccaccatctagaggccatggataccgtgattatggtcattctcgtcgacatgaaagttattctagaggatatagaaatcatccaagttcccgagaaaccagggattatgctccaccacatagagactatgcataccgtgattatggtcattctagttgggatgaacattcctctagaggatatagttatcatgatggctacggtgaggcccttggtagagatcattctgaacatctaagtggaagttcttatagagatgcacttcagagatacgggacctctcatggtgcaccacctgcaagagggcctcggatgtcttatggtggaagcacctgccacgcatatagtaatacacgagatagatatggcagaagttgggagagttactcgagctgtggtgattttcattattgtgatcgtgagcatgtttgcagaaaagaccaaaggaatccgccttctctgggtagggtgctccctgatcctcgtgaagcatgtggtagctcaagttatgtggcatctatagtagatggtggggagagtcgatctgaaaaaggagactcgagcagatattaaagcaagcattgaaaataatagttattgcataccaatccttgtttgcaaatcaaaaattgaaatgttatttctgcattgttacctgcatattactgaaagaaacatgttggttttgtggagagaggtagatactaacttcctccatgaattttttgaggtattcaaaggaaaaggaattgttttcaaagtaatttcatacttgttgatgctatttgaaaagtgtttagatgtaatatctaccttaaaattttcacaataaaatttgacatgtactgc

SEQ ID NO: 4512 - DNA, 1921 bp, Homo sapiens
  source 1..1921: mol_type = genomic DNA
atttccgggcacggcttccggcgtccttccctctcagggaagctccagctgtccctcccgcagttggccctgtggtgttccgaagccggttacgtacggcctgagggccaggcgaacctcaggctctttgtcctactaaaaagcgcagcacaatggtagaagcagatcatcctggcaagcttttcattggtggcctcaatagagaaaccaatgagaagatgcttaaagcagtatttgggaaacatggtcccatatcagaagttcttttgataaaggatcgaaccagcaaatccagaggctttgcatttattacttttgagaaccctgcagatgctaagaatgctgccaaagatatgaatggaaagtctttgcatggaaaagcaataaaagtagaacaagccaagaaaccatcttttcaaagtggtggtaggcggagaccaccagcttcttcgagaaacagaagcccttcaggaagtctgagatctgcaagaggaagccgtggaggaacaagagggtggcttccctcacaagaagggcacctggatgatggtggatacactcctgatctcaagatgagttattctaggggactcattccagttaaaagaggtccatcttcaagaagtggaggtcctcctccgaaaaaatctgctccttctgctgtggcaagaagcaatagttggatgggaagccaaggtcccatgtcacaaagaagagagaattatggagttcctccacgcagagcgacaatatcttcctggagaaatgatcgcatgtcaacaagacatgatggttatgcaactaacgatggaaatcatccaagttgccaagaaacgagggattatgctccaccatctagaggctatgcataccgtgataatggtcattctaatcgggatgaacattcctctagaggatatagaaatcatcgaagttcccgagaaactagggattatgctccaccatctagaggccatgcataccgtgattatggtcattctcgtcgggatgaaagttattctagaggatacagaaatcgtcgaagttcccgagaaactagggagtatgctccaccatctagaggccatggataccgtgattatggtcattctcgtcgacatgaaagttattctagaggatatagaaatcatccaagttcccgagaaaccagggattatgctccaccacatagagactatgcataccgtgattatggtcattctagttgggatgaacattcctctagaggatatagttatcatgatggctacggtgaggcccttggtagagatcattctgaacatctaagtggaagttcttatagagatgcacttcagagatacgggacctctcatggtgcaccacctgcaagagggcctcggatgtcttatggtggaagcacctgccacgcatatagtaatacacgagatagatatggcagaagttgggagagttactcgagctgtggtgattttcattattgtgatcgtgagcatgtttgcagaaaagaccaaaggaatccgccttctctgggtagggtgctccctgatcctcgtgaagcatatggtagctcaagttatgtggcatctatagtagatggtggggagagtcgatctgaaaaaggagactcgagcagatattaaagcaagcattgaaagtaatagttattgcataccaatccttgtttgcaaatcaaaaattgaaatgttatttctgcattgttacctgcatattactgaaagaaacatgttggttttgtggagagaggtagatactaacttcctccatgaattttttgaggtattcaaaggaaaaggaattgttttcaaagtaatttcatacttgttgatgctatttgaaaagtgtttagatgtaatatctaccttaaaattttcacaataaaatttgacatgtactgcaa

SEQ ID NO: 4513 - DNA, 1491 bp, Homo sapiens
  source 1..1491: mol_type = genomic DNA
ggttacgtacggcctgagggccaggcgaacctcaggctctttgtcctactaaaaagcgcagcacaatggtagaagcagatcatcctggcaagcttttcattggtggcctcaatagagaaaccaatgagaagatgcttaaagcagtatttgggaaacatggtcccatatcagaagttcttttgataaaggatcgaaccagcaaatccagaggctttgcatttattacttttgagaaccctgcagatgctaagaatgctgccaaagatatgaatggaaagtctttgcatggaaaagcaataaaagtagaacaagccaagaaaccatcttttcaaagtggtggtaggcggagaccaccagcttcttcgagaaacagaagcccttcaggaagtctgagatctgcaagaggaagccgtggaggaacaagagggtggcttccctcacaagaagggcacctggatgatggtggatacactcctgatctcaagatgagttattctaggggactcattccagttaaaagaggtccatcttcaagaagtggaggtcctcctccgaaaaaatctgctccttctgctgtggcaagaagcaatagttggatgggaagccaaggtcccatgtcacaaagaagagagaattatggagttcctccacgcagagcgacaatatcttcctggagaaatgatcgcatgtcaacaagacatgatggttatgcaactaacgatggaaatcatccaagttgccaagaaacgagggattatgctccaccatctagaggctatgcataccgtgataatggtcattctaatcgggatgaacattcctctagaggatatagaaatcatcgaagttcccgagaaactagggattatgctccaccatctagaggccatgcataccgtgattatggtcattctcgtcgggatgaaagttattctagaggatacagaaatcgtcgaagttcccgagaaactagggagtatgctccaccatctagaggccatggataccgtgattatggtcattctcgtcgacatgaaagttattctagaggatatagttatcatgatggctacggtgaggcccttggtagagatcattctgaacatctaagtggaagttcttatagagatgcacttcagagatacgggacctctcatggtgcaccacctgcaagagggcctcggatgtcctatggtggaagcacctgccacgcatatagtaatacacgagatagatatggcagaagttgggagagttactcgagctgtggtgattttcattattgtgatcgtgagcatgtttgcagaaaagaccaaaggaatccgccttctctgggtagggtgctccctgatcctcgtgaagcatgtggtagctcaagttatgtggcatctatagtagatggtggggagagtcgatctgaaaaaggagactcgagcagatattaaagcaagcattgaaaataatagttattgcataccaatccttgtttgc

SEQ ID NO: 4514 - DNA, 1921 bp, Homo sapiens
  source 1..1921: mol_type = genomic DNA
atttccgggcacggcttccggcgtccttccctctcagggaagctccagctgtccctcccgcagttggccctgtggtgttccgaagccggttacgtacggcctgagggccaggcgaacctcaggctctttgtcctactaaaaagcgcagcacaatggtagaagcagatcatcctggcaagcttttcattggtggcctcaatagagaaaccaatgagaagatgcttaaagcagtatttgggaaacatggtcccatatcagaagttcttttgataaaggatcgaaccagcaaatccagaggctttgcatttattacttttgagaaccctgcagatgctaagaatgctgccaaagatatgaatggaaagtctttgcatggaaaagcaataaaagtagaacaagccaagaaaccatcttttcaaagtggtggtaggcggagaccaccagcttcttcgagaaacagaagcccttcaggaagtctgagatctgcaagaggaagccgtggaggaacaagagggtggcttccctcacaagaagggcacctggatgatggtggatacactcctgatctcaagatgagttattctaggggactcattccagttaaaagaggtccatcttcaagaagtggaggtcctcctccgaaaaaatctgctccttctgctgtggcaagaagcaatagttggatgggaagccaaggtcccatgtcacaaagaagagagaattatggagttcctccacgcagagcgacaatatcttcctggagaaatgatcgcatgtcaacaagacatgatggttatgcaactaacgatggaaatcatccaagttgccaagaaacgagggattatgctccaccatctagaggctatgcataccgtgataatggtcattctaatcgggatgaacattcctctagaggatatagaaatcatcgaagttcccgagaaactagggattatgctccaccatctagaggccatgcataccgtgattatggtcattctcgtcgggatgaaagttattctagaggatacagaaatcgtcgaagttcccgagaaactagggagtatgctccaccatctagaggccatggataccgtgattatggtcattctcgtcgacatgaaagttattctagaggatatagaaatcatccaagttcccgagaaaccagggattatgctccaccacatagagactatgcataccgtgattatggtcattctagttgggatgaacattcctctagaggatatagttatcatgatggctacggtgaggcccttggtagagatcattctgaacatctaagtggaagttcttatagagatgcacttcagagatacgggacctctcatggtgcaccacctgcaagagggcctcggatgtcctatggtggaagcacctgccacgcatatagtaatacacgagatagatatggcagaagttgggagagttactcgagctgtggtgattttcattattgtgatcgtgagcatgtttgcagaaaagaccaaaggaatccgccttctctgggtagggtgctccctgatcctcgtgaagcatgtggtagctcaagttatgtggcatctatagtagatggtggggagagtcgatctgaaaaaggagactcgagcagatattaaagcaagcattgaaaataatagttattgcataccaatccttgtttgcaaatcaaaaattgaaatgttatttctgcattgttacctgcatattactgaaagaaacatgttggttttgtggagagaggtagatactaacttcctccatgaattttttgaggtattcaaaggaaaaggaattgttttcaaagtaatttcatacttgttgatgctatttgaaaagtgtttagatgtaatatctaccttaaaattttcacaataaaatttgacatgtactgcaa

SEQ ID NO: 4515 - DNA, 1769 bp, Homo sapiens
  source 1..1769: mol_type = genomic DNA
atggtagaagcagatcatcctggcaagcttttcattggtggcctcaatagagaaaccaatgagaagatgcttaaagcagtatttgggaaacatggtcccatatcagaagttcttttgataaaggatcgaaccagcaaatccagaggctttgcatttattacttttgagaaccctgcagatgctaagaatgctgccaaagatatgaatggaaagtctttgcatggaaaagcaataaaagtagaacaagccaagaaaccatcttttcaaagtggtggtaggcggagaccaccagcttcttcgagaaacagaagcccttcaggaagtctgagatctgcaagaggaagccgtggaggaacaagagggtggcttccctcacaagaagggcacctggatgatggtggatacactcctgatctcaagatgagttattctaggggactcattccagttaaaagaggtccatcttcaagaagtggaggtcctcctccgaaaaaatctgctccttctgctgtggcaagaagcaatagttggatgggaagccaaggtcccatgtcacaaagaagagagaattatggagttcctccacgcagagcgacaatatcttcctggagaaatgatcgcatgtcaacaagacatgatggttatgcaactaacgatggaaatcatccaagttgccaagaaacgagggattatgctccaccatctagaggctatgcataccgtgataatggtcattctaatcgggatgaacattcctctagaggatatagaaatcatcgaagttcccgagaaactagggattatgctccaccatctagaggccatgcataccgtgattatggtcattctcgtcgggatgaaagttattctagaggatacagaaatcgtcgaagttcccgagaaactagggagtatgctccaccatctagaggccatggataccgtgattatggtcattctcgtcgacatgaaagttattctagaggatatagaaatcatccaagttcccgagaaaccagggattatgctccaccacatagagactatgcataccgtgattatggtcattctagttgggatgaacattcctctagaggatatagttatcatgatggctacggtgaggcccttggtagagatcattctgaacatctaagtggaagttcttatagagatgcacttcagagatacgggacctctcatggtgcaccacctgcaagagggcctcggatgtcctatggtggaagcacctgccacgcatatagtaatacacgagatagatatggcagaagttgggagagttactcgagctgtggtgattttcattattgtgatcgtgagcatgtttgcagaaaagaccaaaggaatccgccttctctgggtagggtgctccctgatcctcgtgaagcatgtggtagctcaagttatgtggcatctatagtagatggtggggagagtcgatctgaaaaaggagactcgagcagatattaaagcaagcattgaaaataatagttattgcataccaatccttgtttgcaaatcaaaaattgaaatgttatttctgcattgttacctgcatattactgaaagaaacatgttggttttgtggagagaggtagatactaacttcctccatgaattttttgaggtattcaaaggaaaaggaattgttttcaaagtaatttcatacttgttgatgctatttgaaaagtgtttagatgtaatatctaccttaaaattttcacaataaaatttgacatgtactgcaa

SEQ ID NO: 4516 - DNA, 1491 bp, Homo sapiens
  source 1..1491: mol_type = genomic DNA
ggttacgtacggcctgagggccaggcgaacctcaggctctttgtcctactaaaaagcgcagcacaatggtagaagcagatcatcctggcaagcttttcattggtggcctcaatagagaaaccaatgagaagatgcttaaagcagtatttgggaaacatggtcccatatcagaagttcttttgataaaggatcgaaccagcaaatccagaggctttgcatttattacttttgagaaccctgcagatgctaagaatgctgccaaagatatgaatggaaagtctttgcatggaaaagcaataaaagtagaacaagccaagaaaccatcttttcaaagtggtggtaggcggagaccaccagcttcttcgagaaacagaagcccttcaggaagtctgagatctgcaagaggaagccgtggaggaacaagagggtggcttccctcacaagaagggcacctggatgatggtggatacactcctgatctcaagatgagttattctaggggactcattccagttaaaagaggtccatcttcaagaagtggaggtcctcctccgaaaaaatctgctccttctgctgtggcaagaagcaatagttggatgggaagccaaggtcccatgtcacaaagaagagagaattatggagttcctccacgcagagcgacaatatcttcctggagaaatgatcgcatgtcaacaagacatgatggttatgcaactaacgatggaaatcatccaagttgccaagaaacgagggattatgctccaccatctagaggctatgcataccgtgataatggtcattctaatcgggatgaacattcctctagaggatatagaaatcatcgaagttcccgagaaactagggattatgctccaccatctagaggccatgcataccgtgattatggtcattctcgtcgggatgaaagttattctagaggatacagaaatcgtcgaagttcccgagaaactagggagtatgctccaccatctagaggccatggataccgtgattatggtcattctcgtcgacatgaaagttattctagaggatatagttatcatgatggctacggtgaggcccttggtagagatcattctgaacatctaagtggaagttcttatagagatgcacttcagagatacgggaccgctcatggtgcaccacctgcaagagggcctcggatgtcctatggtggaagcacctgccacgcatatagtaatacacgagatagatatggcagaagttgggagagttactcgagctgtggtgattttcattattgtgatcgtgagcatgtttgcagaaaagaccaaaggaatccgccttctctgggtagggtgctccctgatcctcgtgaagcatgtggtagctcaagttatgtggcatctatagtagatggtggggagagtcgatctgaaaaaggagactcgagcagatattaaagcaagcattgaaagtaatagttattgcataccaatccttgtttgc

SEQ ID NO: 4517 - DNA, 1921 bp, Homo sapiens
  source 1..1921: mol_type = genomic DNA
atttccgggcacggcttccggcgtccttccctctcagggaagctccagctgtccctcccgcagttggccctgtggtgttccgaagccggttacgtacggcctgagggccaggcgaacctcaggctctttgtcctactaaaaagcgcagcacaatggtagaagcagatcatcctggcaagcttttcattggtggcctcaatagagaaaccaatgagaagatgcttaaagcagtatttgggaaacatggtcccatatcagaagttcttttgataaaggatcgaaccagcaaatccagaggctttgcatttattacttttgagaaccctgcagatgctaagaatgctgccaaagatatgaatggaaagtctttgcatggaaaagcaataaaagtagaacaagccaagaaaccatcttttcaaagtggtggtaggcggagaccaccagcttcttcgagaaacagaagcccttcaggaagtctgagatctgcaagaggaagccgtggaggaacaagagggtggcttccctcacaagaagggcacctggatgatggtggatacactcctgatctcaagatgagttattctaggggactcattccagttaaaagaggtccatcttcaagaagtggaggtcctcctccgaaaaaatctgctccttctgctgtggcaagaagcaatagttggatgggaagccaaggtcccatgtcacaaagaagagagaattatggagttcctccacgcagagcgacaatatcttcctggagaaatgatcgcatgtcaacaagacatgatggttatgcaactaacgatggaaatcatccaagttgccaagaaacgagggattatgctccaccatctagaggctatgcataccgtgataatggtcattctaatcgggatgaacattcctctagaggatatagaaatcatcgaagttcccgagaaactagggattatgctccaccatctagaggccatgcataccgtgattatggtcattctcgtcgggatgaaagttattctagaggatacagaaatcgtcgaagttcccgagaaactagggagtatgctccaccatctagaggccatggataccgtgattatggtcattctcgtcgacatgaaagttattctagaggatatagaaatcatccaagttcccgagaaaccagggattatgctccaccacatagagactatgcataccgtgattatggtcattctagttgggatgaacattcctctagaggatatagttatcatgatggctacggtgaggcccttggtagagatcattctgaacatctaagtggaagttcttatagagatgcacttcagagatacgggaccgctcatggtgcaccacctgcaagagggcctcggatgtcctatggtggaagcacctgccacgcatatagtaatacacgagatagatatggcagaagttgggagagttactcgagctgtggtgattttcattattgtgatcgtgagcatgtttgcagaaaagaccaaaggaatccgccttctctgggtagggtgctccctgatcctcgtgaagcatgtggtagctcaagttatgtggcatctatagtagatggtggggagagtcgatctgaaaaaggagactcgagcagatattaaagcaagcattgaaagtaatagttattgcataccaatccttgtttgcaaatcaaaaattgaaatgttatttctgcattgttacctgcatattactgaaagaaacatgttggttttgtggagagaggtagatactaacttcctccatgaattttttgaggtattcaaaggaaaaggaattgttttcaaagtaatttcatacttgttgatgctatttgaaaagtgtttagatgtaatatctaccttaaaattttcacaataaaatttgacatgtactgcaa

SEQ ID NO: 4518 - DNA, 1881 bp, Homo sapiens
  source 1..1881: mol_type = genomic DNA
agctccagctgtccctcccgcagttggccctgtggtgttccgaagccggttacgtacggcctgagggccaggcgaacctcaggctctttgtcctactaaaaagcgcagcacaatggtagaagcagatcatcctggcaagcttttcattggtggcctcaatagagaaaccaatgagaagatgcttaaagcagtatttgggaaacatggtcccatatcagaagttcttttgataaaggatcgaaccagcaaatccagaggctttgcatttattacttttgagaaccctgcagatgctaagaatgctgccaaagatatgaatggaaagtctttgcatggaaaagcaataaaagtagaacaagccaagaaaccatcttttcaaagtggtggtaggcggagaccaccagcttcttcgagaaacagaagcccttcaggaagtctgagatctgcaagaggaagccgtggaggaacaagagggtggcttccctcacaagaagggcacctggatgatggtggatacactcctgatctcaagatgagttattctaggggactcattccagttaaaagaggtccatcttcaagaagtggaggtcctcctccgaaaaaatctgctccttctgctgtggcaagaagcaatagttggatgggaagccaaggtcccatgtcacaaagaagagagaattatggagttcctccacgcagagcgacaatatcttcctggagaaatgatcgcatgtcaacaagacatgatggttatgcaactaacgatggaaatcatccaagttgccaagaaacgagggattatgctccaccatctagaggctatgcataccgtgataatggtcattctaatcgggatgaacattcctctagaggatatagaaatcatcgaagttcccgagaaactagggattatgctccaccatctagaggccatgcataccgtgattatggtcattctcgtcgggatgaaagttattctagaggatacagaaatcgtcgaagttcccgagaaactagggagtatgctccaccatctagaggccatggataccgtgattatggtcattctcgtcgacatgaaagttattctagaggatatagaaatcatccaagttcccgagaaaccagggattatgctccaccacatagagactatgcataccgtgattatggtcattctagttgggatgaacattcctctagaggatatagttatcatgatggctacggtgaggcccttggtagagatcattctgaacatctaagtggaagttcttatagagatgcacttcagagatacgggacctctcatggtgcaccacctgcaagagggcctcggatgtcctatggtggaagcacctgccacgcatatagtaatacacgagatagatatggcagaagttgggagagttactcgagctgtggtgattttcattattgtgatcgtgagcatgtttgcagaaaagaccaaaggaatccgccttctctgggtagggtgctccctgatcctcgtgaagcatgtggtagctcaagttatgtggcatctatagtagatggtggggagagtcgatctgaaaaaggagactcgagcagatattaaagcaagcattgaaaataatagttattgcataccaatccttgtttgcaaatcaaaaattgaaatgttatttctgcattgttacctgcatattactgaaagaaacatgttggttttgtggagagaggtagatactaacttcctccatgaattttttgaggtattcaaaggaaaaggaattgttttcaaagtaatttcatacttgttgatgctatttgaaaagtgtttagatgtaatatctaccttaaaattttcacaataaaatttgacatgtactgcaa

SEQ ID NO: 4519 - DNA, 1887 bp, Homo sapiens
  source 1..1887: mol_type = genomic DNA
cagggtagctccagctgtccctcccgcagttggccctgtggtgttccgaagccggttacgtacggcctgagggccaggcgaacctcaggctctttgtcctactaaaaagcgcagcacaatggtagaagcagatcatcctggcaagcttttcattggtggcctcaatagagaaaccaatgagaagatgcttaaagcagtatttgggaaacatggtcccatatcagaagttcttttgataaaggatcgaaccagcaaatccagaggctttgcatttattacttttgagaaccctgcagatgctaagaatgctgcgaaagatatgaatggaacgtctttgcatggaaaagcaataaaagtagaacaagccaagaaaccatcttttcaaagtggtggtaggcggagaccaccagcttcttcgagaaacagaagcccttcaggaagtctgagatctgcaagaggaagcagtggaggaacaagagggtggcttccctcacatgaagggcacctggatgatggtggatacactcctgatctcaagatgagttattctaggggactcattccagttaaaagaggtccatcttcaagaagtggaggtcctcctccgaaaaaatctgctccttctgctgtggcaagaagcaatagttggatgggaagccaaggtcccatgtcacaaagaagagagaattatggagttcctccacgcagagcgacaatatcttcctggagaaatgatcgcatgtcaacaagacatgatggttatgcaactaacgatggaaatcatccaagttgccaagaaacgagggattatgctccaccatctagaggctatgcataccgtgataatggtcattctaatcgggatgaacattcctctagaggatatagaaatcatcgaagttcccgagaaactagggattatgctccaccatctagaggccatgcataccgtgattatggtcattctcgtcgggatgaaagttattctagaggatacagaaatcatcgaagttcccgagaaactagggagtatgctccaccatctagaggccatggataccgtgattatggtcattctcgtcgacatgaaagttattctagaggatatagaaatcatccaagttcccgagaaaccagggattatgctccaccacatagagactatgcataccgtgattatggtcattctagttgggatgaacattcctctagaggatatagttatcatgatggctacggtgaggcccttggtagagatcattctgaacatctaagtggaagttcttatagagatgcacttcagaggtacgggacctctcatggtgcaccacctgcaagagggcctcggatgtcttatggtggaagcacctgccacgcatatagtaatacacgagatagatatggcagaagttgggagagttactcgagctgtggtgattttcattattgtgatcgtgagcatgtttgcagaaaagaccaaaggaatccgccttctctgggtagggtgctccctgatcctcgtgaagcatatggtagctcaagttatgtggcatctatagtagatggtggggagagtcgatctgaaaaaggagactcgagcagatattaaagcaagcattgaaaataatagttattgcataccaatccttgtttgcaaatcaaaaattgaaatgttatttctgcattgttacctgcatattactgaaagaaacatgttggttttgtggagagaggtagatactaacttcctccatgaattttttgaggtattcaaaggaaaaggaattgttttcaaagtaatttcatacttgttgatgctatttgaaaagtgtttagatgtaatatctaccttaaaattttcacaataaaattttacatgtactgcaa

SEQ ID NO: 4520 - DNA, 1810 bp, Homo sapiens
  source 1..1810: mol_type = genomic DNA
atttccgggcacggcttccggcgtccttccctctcagggtagctccagctgtccctcccgcagttggccctgtggtgttccgaagccggttacgtacggcctgagggccaggcgaacctcaggctctttgtcctactaaaaagcgcagcacaatggtagaagcagatcatcctggcaagcttttcattggtggcctcaatagagaaaccaatgagaagatgcttaaagcagtatttgggaaacatggtcccatatcagaagttcttttgataaaggatcgaaccagcaaatccagaggctttgcatttattacttttgagaaccctgcagatgctaagaatgctgcgaaagatatgaatggaacgtctttgcatggaaaagcaataaaagtagaacaagccaagaaaccatcttttcaaagtggtggtaggcggagaccaccagcttcttcgagaaacagaagcccttcaggaagtctgagatctgcaagaggaagcagtggaggaacaagagggtggcttccctcacatgaagggcacctggatgatggtggatacactcctgatctcaagatgagttattctaggggactcattccagttaaaagaggtccatcttcaagaagtggaggtcctcctccgaaaaaatctgctccttctgctgtggcaagaagcaatagttggatgggaagccaaggtcccatgtcacaaagaagagagaattatggagttcctccacgcagagcgacaatatcttcctggagaaatgatcgcatgtcaacaagacatgatggttatgcaactaacgatggaaatcatccaagttgccaagaaacgagggattatgctccaccatctagaggctatgcataccgtgataatggtcattctaatcgggatgaacattcctctagaggatatagaaatcatcgaagttcccgagaaactagggattatgctccaccatctagaggccatgcataccgtgattatggtcattctcgtcgggatgaaagttattctagaggatacagaaatcatcgaagttcccgagaaactagggagtatgctccaccatctagaggccatggataccgtgattatggtcattctcgtcgacatgaaagttattctagaggatatagttatcatgatggctacggtgaggcccttggtagagatcattctgaacatctaagtggaagttcttatagagatgcacttcagaggtacgggacctctcatggtgcaccacctgcaagagggcctcggatgtcttatggtggaagcacctgccacgcatatagtaatacacgagatagatatggcagaagttgggagagttactcgagctgtggtgattttcattattgtgatcgtgagcatgtttgcagaaaagaccaaaggaatccgccttctctgggtagggtgctccctgatcctcgtgaagcatatggtagctcaagttatgtggcatctatagtagatggtggggagagtcgatctgaaaaaggagactcgagcagatattaaagcaagcattgaaaataatagttattgcataccaatccttgtttgcaaatcaaaaattgaaatgttatttctgcattgttacctgcatattactgaaagaaacatgttggttttgtggagagaggtagatactaacttcctccatgaattttttgaggtattcaaaggaaaaggaattgttttcaaagtaatttcatacttgttgatgctatttgaaaagtgtttagatgtaatatctaccttaaaattttcacaataaaattttacatgtactgcaa

SEQ ID NO: 4521 - DNA, 1921 bp, Homo sapiens
  source 1..1921: mol_type = genomic DNA
atttccgggcacggcttccggcgtccttccctctcagggtagctccagctgtccctcccgcagttggccctgtggtgttccgaagccggttacgtacggcctgagggccaggcgaacctcaggctctttgtcctactaaaaagcgcagcacaatggtagaagcagatcatcctggcaagcttttcattggtggcctcaatagagaaaccaatgagaagatgcttaaagcagtatttgggaaacatggtcccatatcagaagttcttttgataaaggatcgaaccagcaaatccagaggctttgcatttattacttttgagaaccctgcagatgctaagaatgctgcgaaagatatgaatggaacgtctttgcatggaaaagcaataaaagtagaacaagccaagaaaccatcttttcaaagtggtggtaggcggagaccaccagcttcttcgagaaacagaagcccttcaggaagtctgagatctgcaagaggaagcagtggaggaacaagagggtggcttccctcacatgaagggcacctggatgatggtggatacactcctgatctcaagatgagttattctaggggactcattccagttaaaagaggtccatcttcaagaagtggaggtcctcctccgaaaaaatctgctccttctgctgtggcaagaagcaatagttggatgggaagccaaggtcccatgtcacaaagaagagagaattatggagttcctccacgcagagcgacaatatcttcctggagaaatgatcgcatgtcaacaagacatgatggttatgcaactaacgatggaaatcatccaagttgccaagaaacgagggattatgctccaccatctagaggctatgcataccgtgataatggtcattctaatcgggatgaacattcctctagaggatatagaaatcatcgaagttcccgagaaactagggattatgctccaccatctagaggccatgcataccgtgattatggtcattctcgtcgggatgaaagttattctagaggatacagaaatcatcgaagttcccgagaaactagggagtatgctccaccatctagaggccatggataccgtgattatggtcattctcgtcgacatgaaagttattctagaggatatagaaatcatccaagttcccgagaaaccagggattatgctccaccacatagagactatgcataccgtgattatggtcattctagttgggatgaacattcctctagaggatatagttatcatgatggctacggtgaggcccttggtagagatcattctgaacatctaagtggaagttcttatagagatgcacttcagagatacgggacctctcatggtgcaccacctgcaagagggcctcggatgtcttatggtggaagcacctgccacgcatatagtaatacacgagatagatatggcagaagttgggagagttactcgagctgtggtgattttcattattgtgatcgtgagcatgtttgcagaaaagaccaaaggaatccgccttctctgggtagggtgctccctgatcctcgtgaagcatatggtagctcaagttatgtggcatctatagtagatggtggggagagtcgatctgaaaaaggagactcgagcagatattaaagcaagcattgaaaataatagttattgcataccaatccttgtttgcaaatcaaaaattgaaatgttatttctgcattgttacctgcatattactgaaagaaacatgttggttttgtggagagaggtagatactaacttcctccatgaattttttgaggtattcaaaggaaaaggaattgttttcaaagtaatttcatacttgttgatgctatttgaaaagtgtttagatgtaatatctaccttaaaattttcacaataaaattttacatgtactgcaa

SEQ ID NO: 4522 - DNA, 1886 bp, Homo sapiens
  source 1..1886: mol_type = genomic DNA
cagggtagctccagctgtccctcccgcagttggccctgtggtgttccgaagccggttacgtacgcctgagggccaggcgaacctcaggctctttgtcctactaaaaagcgcagcacaatggtagaagcagatcatcctggcaagcttttcattggtggcctcaatagagaaaccaatgagaagatgcttaaagcagtatttgggaaacatggtcccatatcagaagttcttttgataaaggatcgaaccagcaaatccagaggctttgcatttattacttttgagaaccctgcagatgctaagaatgctgcgaaagatatgaatggaacgtctttgcatggaaaagcaataaaagtagaacaagccaagaaaccatcttttcaaagtggtggtaggcggagaccaccagcttcttcgagaaacagaagcccttcaggaagtctgagatctgcaagaggaagcagtggaggaacaagagggtggcttccctcacatgaagggcacctggatgatggtggatacactcctgatctcaagatgagttattctaggggactcattccagttaaaagaggtccatcttcaagaagtggaggtcctcctccgaaaaaatctgctccttctgctgtggcaagaagcaatagttggatgggaagccaaggtcccatgtcacaaagaagagagaattatggagttcctccacgcagagcgacaatatcttcctggagaaatgatcgcatgtcaacaagacatgatggttatgcaactaacgatggaaatcatccaagttgccaagaaacgagggattatgctccaccatctagaggctatgcataccgtgataatggtcattctaatcgggatgaacattcctctagaggatatagaaatcatcgaagttcccgagaaactagggattatgctccaccatctagaggccatgcataccgtgattatggtcattctcgtcgggatgaaagttattctagaggatacagaaatcatcgaagttcccgagaaactagggagtatgctccaccatctagaggccatggataccgtgattatggtcattctcgtcgacatgaaagttattctagaggatatagaaatcatccaagttcccgagaaaccagggattatgctccaccacatagagactatgcataccgtgattatggtcattctagttgggatgaacattcctctagaggatatagttatcatgatggctacggtgaggcccttggtagagatcattctgaacatctaagtggaagttcttatagagatgcacttcagagatacgggacctctcatggtgcaccacctgcaagagggcctcggatgtcttatggtggaagcacctgccacgcatatagtaatacacgagatagatatggcagaagttgggagagttactcgagctgtggtgattttcattattgtgatcgtgagcatgtttgcagaaaagaccaaaggaatccgccttctctgggtagggtgctccctgatcctcgtgaagcatatggtagctcaagttatgtggcatctatagtagatggtggggagagtcgatctgaaaaaggagactcgagcagatattaaagcaagcattgaaaataatagttattgcataccaatccttgtttgcaaatcaaaaattgaaatgttatttctgcattgttacctgcatattactgaaagaaacatgttggttttgtggagagaggtagatactaacttcctccatgaattttttgaggtattcaaaggaaaaggaattgttttcaaagtaatttcatacttgttgatgctatttgaaaagtgtttagatgtaatatctaccttaaaattttcacaataaaattttacatgtactgcaa

SEQ ID NO: 4523 - DNA, 1810 bp, Homo sapiens
  source 1..1810: mol_type = genomic DNA
atttccgggcacggcttccggcgtccttccctctcagggtagctccagctgtccctcccgcagttggccctgtggtgttccgaagccggttacgtacggcctgagggccaggcgaacctcaggctctttgtcctactaaaaagcgcagcacaatggtagaagcagatcatcctggcaagcttttcattggtggcctcaatagagaaaccaatgagaagatgcttaaagcagtatttgggaaacatggtcccatatcagaagttcttttgataaaggatcgaaccagcaaatccagaggctttgcatttattacttttgagaaccctgcagatgctaagaatgctgcgaaagatatgaatggaacgtctttgcatggaaaagcaataaaagtagaacaagccaagaaaccatcttttcaaagtggtggtaggcggagaccaccagcttcttcgagaaacagaagcccttcaggaagtctgagatctgcaagaggaagcagtggaggaacaagagggtggcttccctcacatgaagggcacctggatgatggtggatacactcctgatctcaagatgagttattctaggggactcattccagttaaaagaggtccatcttcaagaagtggaggtcctcctccgaaaaaatctgctccttctgctgtggcaagaagcaatagttggatgggaagccaaggtcccatgtcacaaagaagagagaattatggagttcctccacgcagagcgacaatatcttcctggagaaatgatcgcatgtcaacaagacatgatggttatgcaactaacgatggaaatcatccaagttgccaagaaacgagggattatgctccaccatctagaggctatgcataccgtgataatggtcattctaatcgggatgaacattcctctagaggatatagaaatcatcgaagttcccgagaaactagggattatgctccaccatctagaggccatgcataccgtgattatggtcattctcgtcgggatgaaagttattctagaggatacagaaatcatcgaagttcccgagaaactagggagtatgctccaccatctagaggccatggataccgtgattatggtcattctcgtcgacatgaaagttattctagaggatatagttatcatgatggctacggtgaggcccttggtagagatcattctgaacatctaagtggaagttcttatagagatgcacttcagagatacgggacctctcatggtgcaccacctgcaagagggcctcggatgtcttatggtggaagcacctgccacgcatatagtaatacacgagatagatatggcagaagttgggagagttactcgagctgtggtgattttcattattgtgatcgtgagcatgtttgcagaaaagaccaaaggaatccgccttctctgggtagggtgctccctgatcctcgtgaagcatatggtagctcaagttatgtggcatctatagtagatggtggggagagtcgatctgaaaaaggagactcgagcagatattaaagcaagcattgaaaataatagttattgcataccaatccttgtttgcaaatcaaaaattgaaatgttatttctgcattgttacctgcatattactgaaagaaacatgttggttttgtggagagaggtagatactaacttcctccatgaattttttgaggtattcaaaggaaaaggaattgttttcaaagtaatttcatacttgttgatgctatttgaaaagtgtttagatgtaatatctaccttaaaattttcacaataaaattttacatgtactgcaa

SEQ ID NO: 4524 - DNA, 4273 bp, Homo sapiens
  source 1..4273: mol_type = genomic DNA
caccaagcgcagccgccgctgccgcactttccacttgtattgatcacctctcagccccgcgcagccggctcgcccgagcggaccgcggccagcgcgccagcccttggcagccccggagcagtcgggctccgggaggaaactccttgggagcgccctgtccggggtgccctctgcgctctgcagtgtctttctttctgcctgggaggaggaggaggaggaggaagaggaggaggaggaggaggaggaggaggaagaggaggaggaggaggaggacgtctggtcccggctgggaggtggagcagcggcagcagcagcagccgccgccgccgccgccgctgccgccgccgccggaaagggagaggcaggagagcccgagacttggaaaccccaaagtgtccgcgaccctgcacggcaggctcccttccagcttcatgggcaaagtgtggaaacagcagatgtaccctcagtacgccacctactattacccccagtatctgcaagccaagcagtctctggtcccagcccaccccatggcccctcccagtcccagcaccaccagcagtaataacaacagtagcagcagtagcaactcaggatgggatcagctcagcaaaacgaacctctatatccgaggactgcctccccacaccaccgaccaggacctggtgaagctctgtcaaccatatgggaaaatagtctccacaaaggcaattttggataagacaacgaacaaatgcaaaggttatggttttgtcgactttgacagccctgcagcagctcaaaaagctgtgtctgccctgaaggccagtggggttcaagctcaaatggcaaagcaacaggaacaagatcctaccaacctctacatttctaatttgccactctccatggatgagcaagaactagaaaatatgctcaaaccatttggacaagttatttctacaaggatactacgtgattccagtggtacaagtcgtggtgttggctttgctaggatggaatcaacagaaaaatgtgaagctgttattggtcattttaatggaaaatttattaagacaccaccaggagtttctgcccccacagaacctttattgtgtaagtttgctgatggaggacagaaaaagagacagaacccaaacaaatacatccctaatggaagaccatggcatagagaaggagaggtgagacttgctggaatgacacttacttacgacccaactacagctgctatacagaacggattttatccttcaccatacagtattgctacaaaccgaatgatcactcaaacttctattacaccctatattgcatctcctgtatctgcctaccaggtgcaaagtccttcgtggatgcaacctcaaccatatattctacagcaccctggtgccgtgttaactccctcaatggagcacaccatgtcactacagcccgcatcaatgatcagccctctggcccagcagatgagtcatctgtcactaggcagcaccggaacatacatgcctgcaacgtcagctatgcaaggagcctacttgccacagtatgcacatatgcagacgacagcggttcctgttgaggaggcaagtggtcaacagcaggtggctgtcgagacgtctaatgaccattctccatatacctttcaacctaataagtaactgtgagatgtacagaaaggtgttcttacatgaagaagggtgtgaaggctgaacaatcatggatttttctgatcaattgtgctttaggaaattattgacagttttgcacaggttcttgaaaacgttatttataatgaaatcaactaaaactatttttgctataagttctataaggtgcataaaacccttaaattcatctagtagctgttcccccgaacaggtttattttagtaaaaaaaaaaaaacaaaaaacaaaaacaaaagatttttatcaaatgttatgatgcaaaaaaagaaaaagaaaaaaaaaaagaaaagaaaacttcaattttctgggtatgcacaaagaccatgaagacttatccaagtgcatgaccggatttttgtggttttgttcattttgtgtttaatttgtgttttttttttccagctgtatgaaatgggctttctgaagtttaaatagtccgacttcacccatggtgttctgtgcttgcagtgcgagtgttgctgtaattcagtgttgccgtcagtgtctcttttcttagctttctgtctttctttcaacgtagtgtgaagtgtcttatccttttctatgaattccaatttgccttaactcttttgatgctgtagctgtttcagtaaaagttagttcaaactaatgatgtagaatgctttgaccaaatgagctggtctattatgccttgtaaaacagcagcatagggcttttaaaaggtagtcaataaaagttgctgaaattttggcttttttaaatatgtagtaggtgtttttaatgatttttcacataatgtgtaaggtagtgaaatgcaagaagggaaaaatgttttgtgtgaaacacattttctgactggggaacttttattagggtaaattgtttgtaaggctgtacgccaacagtttcctctgatagtttgactgatttaggatatctgctgtatgatgcaatgtaaagtcttttttgccttttttcaggaaaaaaaaaaagctaacttgatgtactagatttagtgtaggtagtgttggggttggggatgggggtgggggaggggagtcactgaatgttttgtccttcctttatactaatgatagtgctttagaatgagaattatgcctgaaatctggcaaaccgaaaaatgttgctattgcaacaaagtggcaaaagctaaaagtaaggatttatcttcaaacataagctgagataacgaatagaagcaaaacgattggctactagctctctctctctctctctattaggtaaatttgaaaaataaaaatgacttggcacttttaaaggtaacttcaccaaagaccgaagagccagtaaccagtagctccaacttgtctcagcatcacatcttctgtgctctttatttttgccggaccagtttgcggttaggagaatgtgccttttttgtacctttgcatttaggttttataattttaattgatgtatggacacacacaaacaaaaaagcatgaaggaagatttggatccaagcagtgccacactttacatcatcactacaagtgttcaagtgtaaagaaaaccaattttgaaactatgaaattcctgattcataaatacacagttatttctactttagtacatataagataattcactgttattaaagctcttttattaaggcaattgcatatgttttaaaagcaatggtaaattaagttgtcttccaaaactgtgtacttgtctggtcagctgtgtatgatcagttatctacctcagagtctattttcttttgtgctgggacaggttgctggccctccctgtttccacagaccaaatcctcctagctcaggagctagggctaagcagttatttctttcaagtattttttagttcttaaattttatgcttgtatttgatgatagatgtcagtgacatttcatagtttcaaaagtccttgctgctctgagaagtgtagattctagtgaaaattacatagtcataagagaaatgtgtttttgtttttgtttttgtttcatttttttaaagttgtggtattattggttctatgctccctggaatattactgctttgtgaaagtccagactgaacgcagcaccctctgtgtacctagtacagttataaacctgggtctctcactacttgatatttttgcattagttaagacagaaatttgatagctcggttagaggggaggggaaatctgctgctagaaatgtctgaactaagtgccatactcgtctgggtaagatttgggaaacataacctctgtacataaaaaaaaaaaaatcagttaaacatcacatagtagacagccattaaattataaaaaaattaatttatgaagaaagaccttttgtacagattgaaaaaaaaagattttcatagagatatctatatgatcaagagagttaattttttatttttgttttactagtgccacagacttgccagtggtaacttatttgtccggttcaagataactctgtagttttctttcctaggacttgttgttaaacgccaaaagacatttttgaactgtacatttgatcagattgttagcttttctgttttatttcttttgagaacctttgaataaaaaacatctgaaatttta

SEQ ID NO: 4525 - DNA, 583 bp, Homo sapiens
  source 1..583: mol_type = genomic DNA
atttgccttctcttcacttggggagtatcaatttgccacagagcaagcaacagcgggtggtcctaggagacttctgtgtggtctagggagaccttgacacagtcgcctaagaatggaccgtgtttacagcctctaagaatggactgtgtttagaatgaggggcagcctgaaaaaggcagtctctggtcccagcccaccccatggcccctcccagtcccagcaccaccagcagtaataacaacagtagcagcagtagcaactcaggatgggatcagctcagcaaaacgaacctctatatccgaggactgcctccccacaccaccgaccaggacctggtgaagctctgtcaaccatatgggaaaatagtctccacaaaggcaattttggataagacaacgaacaaatgcaaaggttatggttttgtcgactttgacagccctgcagcagctcaaaaagctgtgtctgccctgaaggccagtggggttcaagctcaaatggcaaagcaacaggaacaagatcctaccaacctctacatttctaatttgccactctccatggatgagcaagaactagaaaatatgct

SEQ ID NO: 4526 - DNA, 1550 bp, Homo sapiens
  source 1..1550: mol_type = genomic DNA
ggaaggattacactgttccaggttttagggagaaaggtttaccaaaccggtggccttaaatgattttcgctccttgatattatcatcttgaaggaaagctgcagtctctggtcccagcccaccccatggcccctcccagtcccagcaccaccagcagtaataacaacagtagcagcagtagcaactcaggatgggatcagctcagcaaaacgaacctctatatccgaggactgcctccccacaccaccgaccaggacctggtgaagctctgtcaaccatatgggaaaatagtctccacaaaggcaattttggataagacaacgaacaaatgcaaaggttatggttttgtcgactttgacagccctgcagcagctcaaaaagctgtgtctgccctgaaggccagtggggttcaagctcaaatggcaaagcaacaggaacaagatcctaccaacctctacatttctaatttgccactctccatggatgagcaagaactagaaaatatgctcaaaccatttggacaagttatttctacaaggatactacgtgattccagtggtacaagtcgtggtgttggctttgctaggatggaatcaacagaaaaatgtgaagctgttattggtcattttaatggaaaatttattaagacaccaccaggagtttctgcccccacagaacctttattgtgtaagtttgctgatggaggacagaaaaagagacagaacccaaacaaatacatccctaatggaagaccatggcatagagaaggagaggctggaatgacacttacttacgacccaactacagctgctatacagaacggattttatccttcaccatacagtattgctacaaaccgaatgatcactcaaacttctattacaccctatattgcatctcctgtatctgcctaccaggtgcaaagtccttcgtggatgcaacctcaaccatatattctacagcaccctggtgccgtgttaactccctcaatggagcacaccatgtcactacagcccgcatcaatgatcagccctctggcccagcagatgagtcatctgtcactaggcagcaccggaacatacatgcctgcaacgtcagctatgcaaggagcctacttgccacagtatgcacatatgcagacgacagcggttcctgttgaggaggcaagtggtcaacagcaggtggctgtcgagacgtctaatgaccattctccatatacctttcaacctaataagtaactgtgagatgtacagaaaggtgttcttacatgaagaagggtgtgaaggctgaacaatcatggatttttctgatcaattgtgctttaggaaattattgacagttttgcacaggttcttgaaaacgttatttataatgaaatcaactaaaactatttttgctataagttctataaggtgcataaaacccttaaattcatctagtagctgttcccccgaacaggtttattttagtaaaaaaaaaaaaacaaaaaacaaaaacaaaagatttttatcaaatgttatgatgcaaaaaaagaaaaagaaaaaaaaaaa

SEQ ID NO: 4527 - DNA, 1815 bp, Homo sapiens
  source 1..1815: mol_type = genomic DNA
ggccgcggtaggtggggacgcggcggcgctgctcctccgctgccgccgggagagtcggcgacgccgccagctccgcgcgcgaactcccgtccatggcacgcagggcggcggctgcccgagctgctcgagtctcgcccgctgccgcgccgtacttttaggcgagtgcggaggtcgaaggcggaggggaagtcagcgcggagctgcagcccccgccggccgccgccgcgcggcgagagggagttcccagagctgccgcggccccgggcccggccggccacctccttgcgccctccccctcgcggcgaggctgccccgcgcccgcgcccgcgcccgcacccgccgccgccgcccgcagcgatgatcttccccagcagcagtggcaaccccgggggcagcagcaactgccggacgccctatcgcaagcagcagtctctggtcccagcccaccccatggcccctcccagtcccagcaccaccagcagtaataacaacagtagcagcagtagcaactcaggatgggatcagctcagcaaaacgaacctctatatccgaggactgcctccccacaccaccgaccaggacctggtgaagctctgtcaaccatatgggaaaatagtctccacaaaggcaattttggataagacaacgaacaaatgcaaaggttatggttttgtcgactttgacagccctgcagcagctcaaaaagctgtgtctgccctgaaggccagtggggttcaagctcaaatggcaaagcaacaggaacaagatcctaccaacctctacatttctaatttgccactctccatggatgagcaagaactagaaaatatgctcaaaccatttggacaagttatttctacaaggatactacgtgattccagtggtacaagtcgtggtgttggctttgctaggatggaatcaacagaaaaatgtgaagctgttattggtcattttaatggaaaatttattaagacaccaccaggagtttctgcccccacagaacctttattgtgtaagtttgctgatggaggacagaaaaagagacagaacccaaacaaatacatccctaatggaagaccatggcatagagaaggagaggctggaatgacacttacttacgacccaactacagctgctatacagaacggattttatccttcaccatacagtattgctacaaaccgaatgatcactcaaacttctattacaccctatattgcatctcctgtatctgcctaccaggtgcaaagtccttcgtggatgcaacctcaaccatatattctacagcaccctggtgccgtgttaactccctcaatggagcacaccatgtcactacagcccgcatcaatgatcagccctctggcccagcagatgagtcatctgtcactaggcagcaccggaacatacatgcctgcaacgtcagctatgcaaggagcctacttgccacagtatgcacatatgcagacgacagcggttcctgttgaggaggcaagtggtcaacagcaggtggctgtcgagacgtctaatgaccattctccatatacctttcaacctaataagtaactgtgagatgtacagaaaggtgttcttacatgaagaagggtgtgaaggctgaacaatcatggatttttctgatcaattgtgctttaggaaattattgacagttttgcacaggttcttgaaaacgttatttataatgaaatcaactaaaactatttttgctataagttctataaggtgcataaaacccttaaattcatctagtagctgttcccccgaacaggtttattttagtaaaaaaaaaaaaacaaaaaa

SEQ ID NO: 4528 - DNA, 1702 bp, Homo sapiens
  source 1..1702: mol_type = genomic DNA
ctggtcccggctgggaggtggagcagcggcagcagcagcagccgccgccgccgccgccgctgccgccgccgccggaaagggagaggcaggagagcccgagacttggaaaccccaaagtgtccgcgaccctgcacggcaggctcccttccagcttcatgggcaaagtgtggaaacagcagatgtaccctcagtacgccacctactattacccccagtatctgcaagccaagcagtctctggtcccagcccaccccatggcccctcccagtcccagcaccaccagcagtaataacaacagtagcagcagtagcaactcaggatgggatcagctcagcaaaacgaacctctatatccgaggactgcctccccacaccaccgaccaggacctggtgaagctctgtcaaccatatgggaaaatagtctccacaaaggcaattttggataagacaacgaacaaatgcaaaggttatggttttgtcgactttgacagccctgcagcagctcaaaaagctgtgtctgccctgaaggccagtggggttcaagctcaaatggcaaagcaacaggaacaagatcctaccaacctctacatttctaatttgccactctccatggatgagcaagaactagaaaatatgctcaaaccatttggacaagttatttctacaaggatactacgtgattccagtggtacaagtcgtggtgttggctttgctaggatggaatcaacagaaaaatgtgaagctgttattggtcattttaatggaaaatttattaagacaccaccaggagtttctgcccccacagaacctttattgtgtaagtttgctgatggaggacagaaaaagagacagaacccaaacaaatacatccctaatggaagaccatggcatagagaaggagaggctggaatgacacttacttacgacccaactacagctgctatacagaacggattttatccttcaccatacagtattgctacaaaccgaatgatcactcaaacttctattacaccctatattgcatctcctgtatctgcctaccaggtggcaaaggaaaccagagaaaacaagtatcggggctctgctatcaaggtgcaaagtccttcgtggatgcaacctcaaccatatattctacagcaccctggtgccgtgttaactccctcaatggagcacaccatgtcactacagcccgcatcaatgatcagccctctggcccagcagatgagtcatctgtcactaggcagcaccggaacatacatgcctgcaacgtcagctatgcaaggagcctacttgccacagtatgcacatatgcagacgacagcggttcctgttgaggaggcaagtggtcaacagcaggtggctgtcgagacgtctaatgaccattctccatatacctttcaacctaataagtaactgtgagatgtacagaaaggtgttcttacatgaagaagggtgtgaaggctgaacaatcatggatttttctgatcaattgtgctttaggaaattattgacagttttgcacaggttcttgaaaacgttatttataatgaaatcaactaaaactatttttgctataagttctataaggtgcataaaacccttaaattcatctagtagctgttcccccgaacaggtttattttagtaaaaaaaaaaaaacaaaaaacaaaaacaaaagatttttatcaaatgttatgatgc

SEQ ID NO: 4529 - DNA, 1490 bp, Homo sapiens
  source 1..1490: mol_type = genomic DNA
atttgccttctcttcacttggggagtatcaatttgccacagcagtctctggtcccagcccaccccatggcccctcccagtcccagcaccaccagcagtaataacaacagtagcagcagtagcaactcaggatgggatcagctcagcaaaacgaacctctatatccgaggactgcctccccacaccaccgaccaggacctggtgaagctctgtcaaccatatgggaaaatagtctccacaaaggcaattttggataagacaacgaacaaatgcaaaggttatggttttgtcgactttgacagccctgcagcagctcaaaaagctgtgtctgccctgaaggccagtggggttcaagctcaaatggcaaagcaacaggaacaagatcctaccaacctctacatttctaatttgccactctccatggatgagcaagaactagaaaatatgctcaaaccatttggacaagttatttctacaaggatactacgtgattccagtggtacaagtcgtggtgttggctttgctaggatggaatcaacagaaaaatgtgaagctgttattggtcattttaatggaaaatttattaagacaccaccaggagtttctgcccccacagaacctttattgtgtaagtttgctgatggaggacagaaaaagagacagaacccaaacaaatacatccctaatggaagaccatggcatagagaaggagaggctggaatgacacttacttacgacccaactacagctgctatacagaacggattttatccttcaccatacagtattgctacaaaccgaatgatcactcaaacttctattacaccctatattgcatctcctgtatctgcctaccaggtgcaaagtccttcgtggatgcaacctcaaccatatattctacagcaccctggtgccgtgttaactccctcaatggagcacaccatgtcactacagcccgcatcaatgatcagccctctggcccagcagatgagtcatctgtcactaggcagcaccggaacatacatgcctgcaacgtcagctatgcaaggagcctacttgccacagtatgcacatatgcagacgacagcggttcctgttgaggaggcaagtggtcaacagcaggtggctgtcgagacgtctaatgaccattctccatatacctttcaacctaataagtaactgtgagatgtacagaaaggtgttcttacatgaagaagggtgtgaaggctgaacaatcatggatttttctgatcaattgtgctttaggaaattattgacagttttgcacaggttcttgaaaacgttatttataatgaaatcaactaaaactatttttgctataagttctataaggtgcataaaacccttaaattcatctagtagctgttcccccgaacaggtttattttagtaaaaaaaaaaaaacaaaaaacaaaaacaaaagatttttatcaaatgttatgatgcaaaaaaagaaaaagaaaaaaaaaaa

SEQ ID NO: 4530 - DNA, 3147 bp, Homo sapiens
  source 1..3147: mol_type = genomic DNA
ccctcgctcccctcctccctccctccccgtctttcttaccccctccctttctctctctctctctctctcgctcgttccctaacattaaagagaaaatgctgctatccgtgacttccaggcccgggatttcgacttttggctacaatagaaacaacaagaagccatatgtgtcattggctcagcagatggcaccacctagcccaagcaacagtacacctaacagcagtagtggaagcaatggaaatgaccagctgagcaaaaccaacctatacatccgaggattgcaaccaggcactactgaccaagatcttgtcaagctgtgtcagccatatggcaagattgtttccactaaggccatactggacaagaccacaaacaaatgtaaaggctatggctttgtagattttgacagcccttcagcagcacagaaagctgtaacagcactgaaggccagcggtgtacaggcacagatggcaaagcaacaggaacaggaccccacaaatttatacatctcaaacctcccactgtcaatggatgagcaggaactggaggggatgctgaagccctttggccaggttatctccacccgtatccttcgagataccagtgggaccagcagaggtgttggctttgcaaggatggagtccacagagaagtgtgaagccatcatcacccactttaatggaaaatatattaagacaccccctggagtaccagccccatccgatcccttgctttgcaaatttgctgatggcgggccaaagaaacgacagaaccaaggaaaatttgtgcaaaatggacgggcttggccaaggaatgcagacatgggcgtcatggccttgacctatgaccccaccacagctcttcagaatgggttttacccagccccctataacatcacccccaacaggatgcttgctcagtctgcactctccccatacctttcctctcctgtgtcttcgtatcagagagtgactcagacatctcctctacaagtacctaacccatcctggatgcaccaccattcatacctcatgcagccttcaggttcagttctgacaccagggatggaccatcccatttctctccagcctgcctccatgatgggaccccttacccagcaactgggccatctctccctcagcagcacaggcacgtatatgccgacggctgcagctatgcaaggagcttacatctcccagtacacccctgtgccttcttccagtgtttcagtcgaggagagcagcggccaacagaaccaagtggcagtggacgcaccctcagagcatggggtctattctttccagttcaacaagtaacagtgggattcccctccccatctttactgaatagaaatgaattcttggagatactcatgctcccagattccagagggttaaccaggaatggagaccatccgtcggccctgctaaggactaacacttagccatcgtttttcacaggcctgggcctggaaaaagaaatctctacgttcctgccctttactattgctgatggagcctgggggaaccatcactttttttgtgtgctacattcaaggagatcaaaaaaacttttcttcttttgcaaagaaagctttttgtttttaactgcaacgtacttttcccctaccttgaagagacatggtggtcgcagcttctcatctatatgaaaaagttttcgatgtattggaattatttgggaatgcttttaaaacaatttgtaattatttctttacaaaccaaaacagaacagaaaggtgtggtgctggaacatcgatgaaggagccctacttactgagcttagttatggacttttttgatgcatgtgtgtatgtgttttaaaaagtatgcaggctctaaaaatgttattttgtaaagctctcagctcatgcaccccatctcctcttcacccatattatgccttctttctcttgtccagattcttctttttctcttttctaaacagctgagcctgcctactttgcccttttacagcttttaattttatggatttttaaaaatgaaatttcatgtggaatttggggttggggggcaggctgggcaaggaacaaggcagaacactaagtaggccatggaagtggctgttctttcccccaccctgccacaccctgggagaaaaaactagactttggcttcagaaagcacagatgtgacccaggcttactaaagagacaactccacagccctgggaacacacccttgagccaaacttggttgaagactaggtcttccctggcaagttccggaagaatggacttactgacttttatcaactcttctcactgccaaggccaacagcatctgaggtatagctttttgggagtacctgctttcttgcctcctggaggatattttctgtcctgggcttcatggcccctctcttccctgttacacattgctgtgctcagagcctttgcagctgcgacctagttgaatccacataggctccttccacacggtggaagatctgctgcttcactcacagaccaggagttctcaatcagaggtggttttgtccctcaggcctttggcaacatctagagacagttttgattgccacgcctggaggtgggatgtgtgtgctactggcatctagtggctgctaaacatcctacactgcataggatagtccccactacccccagccaagaattatctgactccaggggtcaatattgccaagactgggaaacactgatatagacagtgttgtccctgcctcctgggttagggtaaattttcaccccaaccctggacaaacagtgccttttgacactcatgcaactgttggggaaggactggactgggatccttgaattctccccagactttgacttttgataactctgcatatagcaagagtgattcttgaaagagctgtggctccatgctgaatgcacacatgtactcagagggattcaggtgggcattgttctggtgtgtgctgtgcaatggtgggaaaggacaaagctctctaaactgtccagagcaacctgccctgccccggtgtgcttggaccctttgcccagggaaccaggacatcagaaataatgttccttctgtggaaggacaacggggagctagggtagcaaagagcaataaattccaactctttatgaggtca

SEQ ID NO: 4531 - DNA, 3278 bp, Homo sapiens
  source 1..3278: mol_type = genomic DNA
acgctgctccctggagaggctctctcggttccacccaccggctggaaggaggggaagtgaatgaaaggacaggacaagccccgaacaccatgtcactctgggagggagacagcagcaactaagctgtacaaggttttttttttttttttttcttcctttttttctttttttttttctttttcccctttctttttctttctttctttctttttctttctttctttctctttctctctctcttttttctttttctttaaggtggggaaagagacaaccaagagacaggaagctgatctgcaaggattcggagttgtgctaaaaggactttgatttttttccccctttacgaacgctggcaattgacatcactacagacagcctggttagagaacaaactgcctcatcccaagtggaccccggcagctgggggaagccaggcaagatctgggaaggctgtgtgtgggtgttttttctacagatctcactcctcgccctttttttttttcctttggtgtgtgttttttgttttgttttgttttttaaaaaaattcttgctgtgttggaactagcgagtggtggagtctctgaagcctcatcagtcaccgggactgtcaggaatagtggtttaagaggaagctcggcctggggcactataccctgtcatccagttccctgcctcggagataaagattccagctacatgggcaaacgcctggatcagccacaaatgtacccccagtacacttactactatcctcattatctccaaaccaagtcctatgcaccagctccccaccccatggctcctcccagccccagcacaaacagcagcagcaacaacagcagcaacaacagcagcggggaacagttgagtaaaaccaacctgtacattcgaggcctcccaccaggcaccactgaccaggacctaatcaagctgtgccaaccgtatggaaaaattgtatctacaaaggcaattcttgacaaaaacacaaatcagtgcaaaggttatggttttgtagattttgacagtcctgcagccgcacagaaagcggtagcatctctcaaggcaaatggcgtgcaggcacagatggctaagcaacaagagcaagacccaacaaacctatacatctcaaatctccccatttctatggatgagcaggagcttgagaatatgctgaaaccctttggacatgtcatttccacaagaatactaagagacgctaatggagtcagcagaggtgttggctttgccagaatggagtctactgaaaaatgtgaagtggtaattcaacattttaatggaaaatatctgaaaacaccaccaggcatcccagcccccagtgagcctttgctgtgcaaattcgctgatggaggacaaaagaagcgacagaatcaaagcaaatatacccagaatgggaggccttggcccagggaaggagaggctggcatggctttgacctatgaccccacagctgccatacagaatggattttattcttcaccgtacagtattgcaaccaaccgcatgattccacagacatctatcacgccattcattgctgcttcccctgtctccacataccaggtccagagtacttcatggatgcctcatccgccatacgttatgcaaccaacaggtgctgtgattacaccaaccatggaccatcccatgtcaatgcagccagccaacatgatgggcccactgacacagcagatgaatcacctttcgttgggcacaacaggaacgattcaatcccaagacaggattatgatactccaccagctgttgtgtcagtatatgactgctgctgctcctatgcaagggacctacattcctcagtacacgcctgtgcctccgacagctgtttctattgaaggtgttgttgctgatacctctccccagacagtggcaccttcatcccaggacaccagtggtcagcagcaacagatagcagtggacacatccaacgaacatgcacctgcatattcttaccaacagtctaaaccataaacaggactgaagaatgtctgtctgaatctttgccttgaatgaagaaacttcattgaacaagaagttggcttccagtttgcacagacgtcaatggaatgcatttttttgttgttgttgttgttttttttttagtgttataccttacccaatgaaagcaaagtttttatgtgctgtgcaaatggtcttcatgtggtctgacaatttatttttgccatcatttttttaattaaagaaaaaatttccagaagaggaaaaaaaaactacaaaaaacaaaacattgaaggttgatattttatgtggaagaacatttgaattgaattcagaatttttctgaaggtgtagatactttttttttttttttaacagaaaacctgatgtcaagaggtgggcaatagaaatggaaacaaattgtcttcctcaataattaagctactttctctttttcccttcttgttttaatctagtgggttttttattttattttttcttagaaatatgtaggtaaggtttatcttgaatcttaattgccttaattttaaggacgtcaaaggctctcgaggcaagctgtcaacgtcttgttgaaaacaaaaatcaagaaagaattgaaatactgtgccggctttcactggcacagaagtttaagactatgagtttttagggtgaagaaaaaactgtacagtttaaatgaaaatgtttttcttcatttgaagaaaatttgttgataaaccatggcaactgcaagaattggaaaaatgctgggacttttcatgaactttgtcttaagtgttgacatgaatcattctaaaaggctaaaacattttacagtaaagttattaaggttggtttaaaaacaactgcattagaaataatgcgtgtttggggggcagaatgcagatttttttaatttacaaagcgtgatcgctagcaaaagcattagtgctttttatctgcagtcttttttatgagctttacaaagtttttagtcagctttgcttgtcacattgcaaaacctagcttaagagcattaaaaaaaaaaacttaagtagataggagcttatggtcaaaaagtgcaaaaaaaaaaacaaaaaaaaagcaatagatagagaaattgttgacaatttctgtagtctttcctagttgtgatcaaattcagcctatggatggcctattttataccaaagatgaagtgacaccctattacagtccagaagatagaggttgttttcgtttcttttctttttaaaaaaaaaaaaatttatttgaccga

SEQ ID NO: 4532 - DNA, 1864 bp, Homo sapiens
  source 1..1864: mol_type = genomic DNA
atcactacagacagcctggttagagaacaaactgcctcatcccaagtggaccccggcagctgggggaagccaggcaagatctgggaaggctgtgtgtgggtgttttttctacagatctcactcctcgccctttttttttttcctttggtgtgtgttttttgttttgttttgttttttaaaaaaattcttgctgtgttggaactagcgagtggtggagtctctgaagcctcatcagtcaccgggactgtcaggaatagtggtttaagaggaagctcggcctggggcactataccctgtcatccagttccctgcctcggagataaagattccagctacatgggcaaacgcctggatcagccacaaatgtacccccagtacacttactactatcctcattatctccaaaccaagcagtcctatgcaccagctccccaccccatggctcctcccagccccagcacaaacagcagcagcaacaacagcagcaacaacagcagcggggaacagttgagtaaaaccaacctgtacattcgaggcctcccaccaggcaccactgaccaggacctaatcaagctgtgccaaccgtatggaaaaattgtatctacaaaggcaattcttgacaaaaacacaaatcagtgcaaaggttatggttttgtagattttgacagtcctgcagccgcacagaaagcggtagcatctctcaaggcaaatggcgtgcaggcacagatggctaagcaacaagagcaagacccaacaaacctatacatctcaaatctccccatttctatggatgagcaggagcttgagaatatgctgaaaccctttggacatgtcatttccacaagaatactaagagacgctaatggagtcagcagaggtgttggctttgccagaatggagtctactgaaaaatgtgaagtggtaattcaacattttaatggaaaatatctgaaaacaccaccaggcatcccagcccccagtgagcctttgctgtgcaaattcgctgatggaggacaaaagaagcgacagaatcaaagcaaatatacccagaatgggaggccttggcccagggaaggagaggctggcatggctttgacctatgaccccacagctgccatacagaatggattttattcttcaccgtacagtattgcaaccaaccgcatgattccacagacatctatcacgccattcattgctgcttcccctgtctccacataccaggtccagagtacttcatggatgcctcatccgccatacgttatgcaaccaacaggtgctgtgattacaccaaccatggaccatcccatgtcaatgcagccagccaacatgatgggcccactgacacagcagatgaatcacctttcgttgggcacaacaggaacgattcaatcccaagacaggattatgatactccaccagctgttgtgtcagtatatgactgctgctgctcctatgcaagggacctacattcctcagtacacgcctgtgcctccgacagctgtttctattgaaggtgttgttgctgatacctctccccagacagtggcaccttcatcccaggacaccagtggtcagcagcaacagatagcagtggacacatccaacgaacatgcacctgcatattcttaccaacagtctaaaccataaacaggactgaagaatgtctgtctgaatctttgccttgaatgaagaaacttcattgaacaagaagttggcttccagtttgcacagacgtcaatggaatgcatttttttgttgttgttgttgttttttttttagtgttataccttacccaatgaaagcaaagtttttatgtgctgtgcaaatggtcttcatgtggtctgacaatttatttttgcca

SEQ ID NO: 4533 - DNA, 2757 bp, Homo sapiens
  source 1..2757: mol_type = genomic DNA
ttctacagatctcactcctcgccctttttttttttcctttggtgtgtgttttttgttttgttttgttttttaaaaaaattcttgctgtgttggaactagcgagtggtggagtctctgaagcctcatcagtcaccgggactgtcaggaatagtggtttaagaggaagctcggcctggggcactataccctgtcatccagttccctgcctcggagataaagattccagctacatgggcaaacgcctggatcagccacaaatgtacccccagtacacttactactatcctcattatctccaaaccaagtcctatgcaccagctccccaccccatggctcctcccagccccagcacaaacagcagcagcaacaacagcagcaacaacagcagcggggaacagttgagtaaaaccaacctgtacattcgaggcctcccaccaggcaccactgaccaggacctaatcaagctgtgccaaccgtatggaaaaattgtatctacaaaggcaattcttgacaaaaacacaaatcagtgcaaaggttatggttttgtagattttgacagtcctgcagccgcacagaaagcggtagcatctctcaaggcaaatggcgtgcaggcacagatggctaagcaacaagagcaagacccaacaaacctatacatctcaaatctccccatttctatggatgagcaggagcttgagaatatgctgaaaccctttggacatgtcatttccacaagaatactaagagacgctaatggagtcagcagaggtgttggctttgccagaatggagtctactgaaaaatgtgaagtggtaattcaacattttaatggaaaatatctgaaaacaccaccaggcatcccagcccccagtgagcctttgctgtgcaaattcgctgatggaggacaaaagaagcgacagaatcaaagcaaatatacccagaatgggaggccttggcccagggaaggagaggctggcatggctttgacctatgaccccacagctgccatacagaatggattttattcttcaccgtacagtattgcaaccaaccgcatgattccacagacatctatcacgccattcattgctgcttcccctgtctccacataccagggtgctgtgattacaccaaccatggaccatcccatgtcaatgcagccagccaacatgatgggcccactgacacagcagatgaatcacctttcgttgggcacaacaggaacgattcaatcccaagacaggattatgatactccaccagctgttgtgtcagtatatgactgctgctgctcctatgcaagggacctacattcctcagtacacgcctgtgcctccgacagctgtttctattgaaggtgttgttgctgatacctctccccagacagtggcaccttcatcccaggacaccagtggtcagcagcaacagatagcagtggacacatccaacgaacatgcacctgcatattcttaccaacagtctaaaccataaacaggactgaagaatgtctgtctgaatctttgccttgaatgaagaaacttcattgaacaagaagttggcttccagtttgcacagacgtcaatggaatgcatttttttgttgttgttgttgttttttttttagtgttataccttacccaatgaaagcaaagtttttatgtgctgtgcaaatggtcttcatgtggtctgacaatttatttttgccatcatttttttaattaaagaaaaaatttccagaagaggaaaaaaaaactacaaaaaacaaaacattgaaggttgatattttatgtggaagaacatttgaattgaattcagaatttttctgaaggtgtagatactttttttttttttttaacagaaaacctgatgtcaagaggtgggcaatagaaatggaaacaaattgtcttcctcaataattaagctactttctctttttcccttcttgttttaatctagtgggttttttattttattttttcttagaaatatgtaggtaaggtttatcttgaatcttaattgccttaattttaaggacgtcaaaggctctcgaggcaagctgtcaacgtcttgttgaaaacaaaaatcaagaaagaattgaaatactgtgccggctttcactggcacagaagtttaagactatgagtttttagggtgaagaaaaaactgtacagtttaaatgaaaatgtttttcttcatttgaagaaaatttgttgataaaccatggcaactgcaagaattggaaaaatgctgggacttttcatgaactttgtcttaagtgttgacatgaatcattctaaaaggctaaaacattttacagtaaagttattaaggttggtttaaaaacaactgcattagaaataatgcgtgtttggggggcagaatgcagatttttttaatttacaaagcgtgatcgctagcaaaagcattagtgctttttatctgcagtcttttttatgagctttacaaagtttttagtcagctttgcttgtcacattgcaaaacctagcttaagagcattaaaaaaaaaaacttaagtagataggagcttatggtcaaaaagtgcaaaaaaaaaaacaaaaaaaaagcaatagatagagaaattgttgacaatttctgtagtctttcctagttgtgatcaaattcagcctatggatggcctattttataccaaagatgaagtgacaccctattacagtccagaagatagaggttgttttcgtttcttttctttttaaaaaaaaaaaaatttatttgaccga

SEQ ID NO: 4534 - DNA, 1394 bp, Homo sapiens
  source 1..1394: mol_type = genomic DNA
agctcggcctggggcactataccctgtcatccagttccctgcctcggagataaagattccagctacatgggcaaacgcctggatcagccacaaatgtacccccagtacacttactactatcctcattatctccaaaccaagcagtcctatgcaccagctccccaccccatggctcctcccagccccagcacaaacagcagcagcaacaacagcagcaacaacagcagcggggaacagttgagtaaaaccaacctgtacattcgaggcctcccaccaggcaccactgaccaggacctaatcaagctgtgccaaccgtatggaaaaattgtatctacaaaggcaattcttgacaaaaacacaaatcagtgcaaaggttatggttttgtagattttgacagtcctgcagccgcacagaaagcggtagcatctctcaaggcaaatggcgtgcaggcacagatggctaagcaacaagagcaagacccaacaaacctatacatctcaaatctccccatttctatggatgagcaggagcttgagaatatgctgaaaccctttggacatgtcatttccacaagaatactaagagacgctaatggagtcagcagaggtgttggctttgccagaatggagtctactgaaaaatgtgaagtggtaattcaacattttaatggaaaatatctgaaaacaccaccaggcatcccagcccccagtgagcctttgctgtgcaaattcgctgatggaggacaaaagaagcgacagaatcaaagcaaatatacccagaatgggaggccttggcccagggaaggagaggtactcagaggcaggactgtccctaggcaaaatcgtgaagctggcatggctttgacctatgaccccacagctgccatacagaatggattttattcttcaccgtacagtattgcaaccaaccgcatgattccacagacatctatcacgccattcattgctgcttcccctgtctccacataccaggtccagagtacttcatggatgcctcatccgccatacgttatgcaaccaacaggtgctgtgattacaccaaccatggaccatcccatgtcaatgcagccagccaacatgatgggcccactgacacagcagatgaatcacctttcgttgggcacaacaggaacgtatatgactgctgctgctcctatgcaagggacctacattcctcagtacacgcctgtgcctccgacagctgtttctattgaaggtgttgttgctgatacctctccccagacagtggcaccttcatcccaggacaccagtggtcagcagcaacagatagcagtggacacatccaacgaacatgcacctgcatattcttaccaacagtctaagtaagtctgggctgtgctaagctcttttcc

SEQ ID NO: 4535 - DNA, 8208 bp, Homo sapiens
  source 1..8208: mol_type = genomic DNA
tttttttccccctttacgaacgctggcaattgacatcactacagacagcctggttagagaacaaactgcctcatcccaagtggaccccggcagctgggggaagccaggcaagatctgggaaggctgtgtgtgggtgttttttctacagatctcactcctcgccctttttttttttcctttggtgtgtgttttttgttttgttttgttttttaaaaaaattcttgctgtgttggaactagcgagtggtggagtctctgaagcctcatcagtcaccgggactgtcaggaatagtggtttaagaggaagctcggcctggggcactataccctgtcatccagttccctgcctcggagataaagattccagctacatgggcaaacgcctggatcagccacaaatgtacccccagtacacttactactatcctcattatctccaaaccaagcagtcctatgcaccagctccccaccccatggctcctcccagccccagcacaaacagcagcagcaacaacagcagcaacaacagcagcggggaacagttgagtaaaaccaacctgtacattcgaggcctcccaccaggcaccactgaccaggacctaatcaagctgtgccaaccgtatggaaaaattgtatctacaaaggcaattcttgacaaaaacacaaatcagtgcaaaggttatggttttgtagattttgacagtcctgcagccgcacagaaagcggtagcatctctcaaggcaaatggcgtgcaggcacagatggctaagcaacaagagcaagacccaacaaacctatacatctcaaatctccccatttctatggatgagcaggagcttgagaatatgctgaaaccctttggacatgtcatttccacaagaatactaagagacgctaatggagtcagcagaggtgttggctttgccagaatggagtctactgaaaaatgtgaagtggtaattcaacattttaatggaaaatatctgaaaacaccaccaggcatcccagcccccagtgagcctttgctgtgcaaattcgctgatggaggacaaaagaagcgacagaatcaaagcaaatatacccagaatgggaggccttggcccagggaaggagaggtactcagaggcaggactgtccctaggcaaaatcgtgaagctggcatggctttgacctatgaccccacagctgccatacagaatggattttattcttcaccgtacagtattgcaaccaaccgcatgattccacagacatctatcacgccattcattgctgcttcccctgtctccacataccaggtccagagtacttcatggatgcctcatccgccatacgttatgcaaccaacaggtgctgtgattacaccaaccatggaccatcccatgtcaatgcagccagccaacatgatgggcccactgacacagcagatgaatcacctttcgttgggcacaacaggaacgtatatgactgctgctgctcctatgcaagggacctacattcctcagtacacgcctgtgcctccgacagctgtttctattgaaggtgttgttgctgatacctctccccagacagtggcaccttcatcccaggacaccagtggtcagcagcaacagatagcagtggacacatccaacgaacatgcacctgcatattcttaccaacagtctaaaccataaacaggactgaagaatgtctgtctgaatctttgccttgaatgaagaaacttcattgaacaagaagttggcttccagtttgcacagacgtcaatggaatgcatttttttgttgttgttgttgttttttttttagtgttataccttacccaatgaaagcaaagtttttatgtgctgtgcaaatggtcttcatgtggtctgacaatttatttttgccatcatttttttaattaaagaaaaaatttccagaagaggaaaaaaaaactacaaaaaacaaaacattgaaggttgatattttatgtggaagaacatttgaattgaattcagaatttttctgaaggtgtagatactttttttttttttttaacagaaaacctgatgtcaagaggtgggcaatagaaatggaaacaaattgtcttcctcaataattaagctactttctctttttcccttcttgttttaatctagtgggttttttattttattttttcttagaaatatgtaggtaaggtttatcttgaatcttaattgccttaattttaaggacgtcaaaggctctcgaggcaagctgtcaacgtcttgttgaaaacaaaaatcaagaaagaattgaaatactgtgccggctttcactggcacagaagtttaagactatgagtttttagggtgaagaaaaaactgtacagtttaaatgaaaatgtttttcttcatttgaagaaaatttgttgataaaccatggcaactgcaagaattggaaaaatgctgggacttttcatgaactttgtcttaagtgttgacatgaatcattctaaaaggctaaaacattttacagtaaagttattaaggttggtttaaaaacaactgcattagaaataatgcgtgtttggggggcagaatgcagatttttttaatttacaaagcgtgatcgctagcaaaagcattagtgctttttatctgcagtcttttttatgagctttacaaagtttttagtcagctttgcttgtcacattgcaaaacctagcttaagagcattaaaaaaaaaaacttaagtagataggagcttatggtcaaaaagtgcaaaaaaaaaaacaaaaaaaaagcaatagatagagaaattgttgacaatttctgtagtctttcctagttgtgatcaaattcagcctatggatggcctattttataccaaagatgaagtgacaccctattacagtccagaagatagaggttgttttcgtttcttttctttttaaaaaaaaaaaaatttatttgaccgacatggccggaccagttctttctttgttgtttgtttaaactaccttccactggtgttttacatagtgcaaaaaaaaaaagagggtggggggagttgtctctcttttctttaaatgtgtattcattgatagcagaagcttgtacctgctgtgtttagcagtttcagcatgaagagttctggatatgaactgattcatagagccaagtggctttaaattctgtgagcttttctggtttctcactagctgtcttgaatagtgaaacctgtattgatggccactagtaaaccaagatgcttatttaacaggtggaatattctttatatgaaatttcagctaaagacactttctggacctggtctgaaaggtcatttgtcaaaaaagcttagggatattctgtgaaatggtgagtggtctcctggaaaggtctcattgtatttgaacaatagtcttccctctaaattacaacacctctgggttttgtctttacacctctgtctttgtcatcacctaccatgaatagtcaccttggttttgcaaatggggagggggtatcatctttttgcctgttttcactgtatttttgtatattggtgttgccgaaagaactttttctttcagtttaattctttgaggcatgtaggaccaataagattgagaattctattggtggaatttagggaagtccttaaaatgctagttgacaatcaaggaacagtatgatttatatcaataagaaccaaaagaattaggtttgatcaatcatttaagccaaggaggaatacttgcatttagaacaatgcaaaactttgtctaaaatgaattaaattgacccacctgtaaaatatatctacatttttaattcatgagatgatatgtgttcaacctttacagttttacctgaaattaaggacaatggaatagaatttgttaagtgaaccattcactagattgctttctgaatgaatcctttgaatcaaataggtgaaactcttttcaaaaactaagtcagtcacaggagcctgtcttagtccaaaagaagcagggaaatgtatttaagtgtactataaaacagggtaggctttttaaaaactaaaaagttttaaaggtaaatcatattcccattaggtcaacatgagtaataaggttgactcatgtgaaattgtcaatattctactatttctgtaaactctggttctcttatttgcaaccccatgcactggaagcccaaatcagagaatgactccatatatttatggtcacattggagacaaaagtgtatccaagaaaatgtagtgtgcgttatagagaaattccaactggtcacactcaccattatggtttttcatgctttagagaaaatgctagatttatactgtcttttgttccatccttcagcttcccatgcattataaaggtggcacttaagtttttatctttgaaaagtgggccccaaagttttttggggtacaaaaagacatgtatgagaaccatattttctgtttctctttttcactctctaaactctttttgtataaataaggattatcctgggcataattcatttgaatatgaaaccaacatactttctttcatttttgtgaaaaaataaccaaaaacatgtattaatgtgatacaaagaaagtctcattcacacaatcaacaatgaggctaagaggtagctaccatgtggctaatgaatgtgcctaggtaacttcctgtttctattcaaaactgctgctttatttgtacattcagaaatatttttttcaactatgaaatttcaatatcaattttttaagccagtttctgcaaaaggaaatgacctgtcatttgatgtgttcatgtgtgttttgtgtttggatagtttatatcatgccattctataaaatgtatgttttcaaaccaaaaagaaaaaaaatagaaggaaaacaacggcacatactcaaatttgccctgctttgtctgttgtcttacctaagacttgttttgaagagccaagtctgggagagaaaaaaaagcatcaacaggtaagcagcattacattgtgtggtaataaaccaaaataagttttcaatatatacagacaacagaattcaaatttaatcaacaaaatatattgtagtgatttgtttgtttgtttgtttgagacggagtctcgctctgtcgcccatcctaactaggactataatctttttttttttctttaagttgaagttaattttctgtgcattctggtccaccagattttcaagcatttatttggatgtttccatttttccttttgactttaatagccaagacttagcttaaacatcaggaaacaaactaaagccacaatccaaatgagagaaacactgtctcgtctaaactctagtttcatggtcagtgcaacagtgagttttcttttaataatggtatggtattgtcaagggaggcaaagtgttcatggtaacttggagctccccaatacatggccatgtcttctaaagacaacgtaatgagcccaagtgaactgaaggtcatactggcaggtgctgatgacagtttgtccttgaatgctgacatgtcttgaatattgcaaatgtcataatactcttttaaaacagtcctctacctgactctagttttgcgaggattagtttgtttccttggtagatttcaacatttcagaatgttacctccaaatttcacttgaattacttcctcctgtgaccttagcagatctgtcacatttgaaagcatatgactcacttccacccccttctaatgaaaaactgcatggtgttaaaagcactctcattagaaatataaggctgagaactgaagaaggctgtttaaagcaggaatttcactttattttactatgcctaaaaatacatctttggaccccttgcaaagtgctttaaaagtactttcaatttatgcatgactccaaaaaagtaatttttttttcccaaaaaaacctctttatttaaataattgggatatttgctaaatacctatttttttttacagtggcctaaaacccctattaatgaaaagtgaaatttgatttaattaggactcttgcagtcatcttcacgactgaggagaagtttcaataggctgtctagacattatgatgttaataggagattaaaatacatttggcaattcattttcattcttaatttgagtgcatgaaccactgcagatgagctgataagcagaaattctcaagtgggtttcactaataaatgtttttttatatgatttgaaatcaagtaaagggacaatgtttatgtacgtgtataacaacattcagcacatttgaggaatcacacactataataaagcttaaacctgtcatagaaccttgatctatattactttgtcttcagtaaaaagtgaaggatgagattttgtctttcatgttattgtagctggcatgcttcaaaattttgagcttactgggactgacagcctctcacttcaatctgagggattgacagaatttaaacaggctcattgattctgtacactctacccttcctgtggcaagtgataatgggatttcattaatgaatcaatttgttttacaaatgacatccactgtggcattggaagacagttgggtctgactcaagtttaacatttcttaccaaacattcttaagtatgaaattggtcctttaatccaaatgctcttggtcatggctgtcctttgcggattacatagcattcaggaaagtacaaaaactaaacactaaatccccaactggccccaaagaccttttatgatgtgagagacaagagttcaccccagattaatttcttttatcattggctttatactctaacatatagatactctctatagcaaaaaagggatgaatggctttcaatattcatttctgtttatttttgtgagggaaaataatatatcaagaaaattttcttccacttagaaagctttaaagctgaagtagaggtgcagtcaagcttggatctgcaggaagaaccactaggccactgagtcatacttgagcttttcttactactgccccaatttctaaattgtgcataaatacaatcactctcaatttttgaagggctaattatctactttgtgggtgtgttttgttttttcttttcagcgtgtagggcttgggctctgtttccttttattagcatgtcacctgagggtggaacaaacaattggaaataaaatttgattattttatttcttataaagtattaatttcttaagggggtttgaaatcattggtaaaattaatatcagtacattatatgtcataaattttgattatctataatgtcttttcttatctaccacaaataattgagagttggctaaattcttgcagaatatatgggaaaaaaatcatagcaaagaattcagcttccctcaaaagaaagctatttttgtttccttcactccactaaatttgaaccagtagcacggatcaacacgacttctgcaatgagagtataacggtagctcttggtacagtcatattcatatttttaaatctttctttgaccaaaactattgcattgttttcattacattttgactgcgttacttattaaggccgaatgactttgacacccccgtggattatttttatgatcacatcaaatttaaacaatgtccaaagtgtaactttaatgttatattttgtttcaaaccctctggtctaagattattgagaaagatgttttttcctcctccctcaaatatgttatctcttcatatataaaaaaataagttattccatgcttttcaggaactgtaaaaattatttcaaaaagatatttgaaaaagttttctctattctggacacaaatgcttccatttatttcaaaagaagaagaagaaaaatggaatcttaatttaaaaaaatatatgtagtagtatctgctatgagatattcagtctctataaaaaaaaaaagggacacagcttcttttaaaacccttgtttcagtccatattcaacttcatggaacttctgaaacatcattcaattttgaactttatttaagagcatttttgtactgctgtctctgactgtcatggaaagttctgtaattctaaggtgtttctggttttatttttaatttcttcatctgtaccacagtcaaattagcaaccatctcccccatcccttgggctttctgtagatcagtggatgttaggtttaaacttctgttttctttgatgaagctttcaataaaaaatgaaaataaaatcaattgaatagg

SEQ ID NO: 4536 - DNA, 1598 bp, Homo sapiens
  source 1..1598: mol_type = genomic DNA
ttctacagatctcactcctcgccctttttttttttcctttggtgtgtgttttttgttttgttttgttttttaaaaaaattcttgctgtgttggaactagcgagtggtggagtctctgaagcctcatcagtcaccgggactgtcaggaatagtggtttaagaggaagctcggcctggggcactataccctgtcatccagttccctgcctcggagataaagattccagctacatgggcaaacgcctggatcagccacaaatgtacccccagtacacttactactatcctcattatctccaaaccaagcagtcctatgcaccagctccccaccccatggctcctcccagccccagcacaaacagcagcagcaacaacagcagcaacaacagcagcggggaacagttgagtaaaaccaacctgtacattcgaggcctcccaccaggcaccactgaccaggacctaatcaagctgtgccaaccgtatggaaaaattgtatctacaaaggcaattcttgacaaaaacacaaatcagtgcaaaggttatggttttgtagattttgacagtcctgcagccgcacagaaagcggtagcatctctcaaggcaaatggcgtgcaggcacagatggctaagcaacaagagcaagacccaacaaacctatacatctcaaatctccccatttctatggatgagcaggagcttgagaatatgctgaaaccctttggacatgtcatttccacaagaatactaagagacgctaatggagtcagcagaggtgttggctttgccagaatggagtctactgaaaaatgtgaagtggtaattcaacattttaatggaaaatatctgaaaacaccaccaggcatcccagcccccagtgagcctttgctgtgcaaattcgctgatggaggacaaaagaagcgacagaatcaaagcaaatatacccagaatgggaggccttggcccagggaaggagaggctggcatggctttgacctatgaccccacagctgccatacagaatggattttattcttcaccgtacagtattgcaaccaaccgcatgattccacagacatctatcacgccattcattgctgcttcccctgtctccacataccaggtccagagtacttcatggatgcctcatccgccatacgttatgcaaccaacaggtgctgtgattacaccaaccatggaccatcccatgtcaatgcagccagccaacatgatgggcccactgacacagcagatgaatcacctttcgttgggcacaacaggaacgtatatgactgctgctgctcctatgcaagggacctacattcctcagtacacgcctgtgcctccgacagctgtttctattgaaggtgttgttgctgatacctctccccagacagtggcaccttcatcccaggacaccagtggtcagcagcaacagatagcagtggacacatccaacgaacatgcacctgcatattcttaccaacagtctaagtaagtctgggctgtgctaagctcttttcctcaagatcagccatcttgacatcactctctcatgttgtatgtgttagcttttgctgaaatataaaccatcccaaactta

SEQ ID NO: 4537 - DNA, 2207 bp, Homo sapiens
  source 1..2207: mol_type = genomic DNA
ccgcgccggaggacgagcctcggtcatcgcgctgccctcccaggttcaacaggctacccatgtgcccgctccagtaagcgtgcaaccagcccggtcagtcccagggactttaccggctaggagacaccttgaacgtccccagcgcgactcccacaaactgccttgactctttaacgcttcctcgctggcgcccattgggccaggcgtttacgtcatcgctgcgcgccgggcggcggcgacttcccgctccttgactctgacgtcagagcggcgccggcctcggcggctgaggaaagcaggaggaggtggcggcggcgggaagatgctgctctttggcgtaaattgcaatcgattagggatcgtttctcagaatcaagttagaagtgagagttcagataagtgaggccgccattgctgctttgaacacctcagaaggggagaatggatttatcaggagtgaaaaagaagagcttgctaggagtcaaagaaaataataaaaagtccagcactagggctccttcacctaccaaacgcaaagaccgctcagatgagaagtccaaggatcgctcaaaagataaaggggccaccaaggagtcgagtgagaaggatcgcggccgggacaaaacccgaaagaggcgcagcgcttccagtggtagcagcagtaccaggtctcggtccagctcgacttccagctcaggctccagcaccagcactggctcaagcagtggctccagctcttcctcagcatccagccgctcaggaagctccagcacctcccgcagctccagctctagcagctcttctggctctccaagtccttctcggcgcagacacgacaacaggaggcgctcccgctccaaatccaaaccacctaaaagagatgaaaaggagaggaaaaggcggagcccatctcctaagcccaccaaagtgcacattgggagactcacccggaatgtgacaaaggatcacatcatggagatattttccacctatgggaaaattaaaatgattgacatgcccgtggaaaggatgcatccccatctgtccaaaggctatgcgtacgtagagtttgagaatccagatgaagccgagaaggcgctgaagcacatggatggaggacaaattgatggccaggagatcactgccaccgccgtgctggccccctggcctaggccaccccccaggagattcagccctcccaggagaatgttgccaccaccgcctatgtggcgcaggtctcccccacggatgaggagaaggtcccgctccccgaggcgcaggtcccccgtgcgccggagatcacggtccccgggccgccgccgccacaggagccgctccagctccaactcctcccgataaacaggccactgaagctctcgcccctgtaacttataccccacccagctcagttttgtcacttttctagccaaaggaagaccagtaggaaagcaaacccttgactctggcaggatttgcaggcagcaggcagcacccctctgccagccgggccccggctgcagaagtgctgttggtttggatgctgtgtgcctgtcaagattccctccggttttctggctagaaagctcatccgtttccggtttctaagagtcagttcagtggcagagccaccagggaaaagtgaggctcttgggggtggtttgaccctgcttacctgggagcacacttttcccttccccgatgacctgggatggtggccaggccgtgcccttgctgttgctgggcagtgtccttttggaaagggagctgccccaggctttagtgcagctgccaaccctgttaggcctggcctctcgaggcctcttctgacctcaagggtcacaccccctcaaagatcctctcacccatggtagttgctgctcgtggttctgtctgtccgtgcaccgatgcacacaccgcaccccaccactgtactctgaaattggcgagtgagtggagagccagctctgcggagtcatcacgcagccatggttgtgcctgccgttcatggtggtctttcaggttatcttggcaacatgtacattgcttttattttttttcttttttgctttcattgtacagtcagtactataaaatttctcttttgagttttatacctttgtagcattttagatgacattgtgtttgtactttgttgtgtagagtggaagaattgtgttgaataaacccaagatcggaatgcaaatcta

SEQ ID NO: 4538 - DNA, 1271 bp, Homo sapiens
  source 1..1271: mol_type = genomic DNA
ggcgccggcctcggcggctgaggaaagcaggaggaggtggcggcggcgggaagatgacgcgcacctttccggaggatgggggaggtaaccgaggtcctgagccggtacctgaacttgggctgctctttggcgtaaattgcaatcgattagggatcgtttctcagaatcaagttagaagtgagagttcagataagtgaggccgccattgctgctttgaacacctcagaaggggagaatggatttatcaggagtgaaaaagaagagcttgctaggagtcaaagaaaataataaaaagtccagcactagggctccttcacctaccaaacgcaaagaccgctcagatgagaagtccaaggatcgctcaaaagataaaggggccaccaaggagtcgagtgagaaggatcgcggccgggacaaaacccgaaagaggcgcagcgcttccagtggtagcagcagtaccaggtctcggtccagctcgacttccagctcaggctccagcaccagcactggctcaagcagtggctccagctcttcctcagcatccagccgctcaggaagctccagcacctcccgcagctccagctctagcagctcttctggctctccaagtccttctcggcgcagacacgacaacaggaggcgctcccgctccaaatccaaaccacctaaaagagatgaaaaggagaggaaaaggcggagcccatctcctaagcccaccaaagtgcacattgggagactcacccggaatgtgacaaaggatcacatcatggagatattttccacctatgggaaaattaaaatgattgacatgcccgtggaaaggatgcatccccatctgtccaaaggctatgcgtacgtagagtttgagaatccagatgaagccgagaaggcgctgaagcacatggatggaggacaaattgatggccaggagatcactgccaccgccgtgctggccccctggcctaggccaccccccaggagattcagccctcccaggagaatgttgccaccaccgcctatgtggcgcaggtctcccccacggatgaggagaaggtcccgctccccgaggcgcaggtcccccgtgcgccggagatcacggtccccgggccgccgccgccacaggagccgctccagctccaactcctcccgataaacaggccactgaagctctcgcccctgtaacttataccccacccagctcagttttgtcacttttctagccaaaggaagaccagtaggaaagcaaacccttgactctggcaggatttgca

SEQ ID NO: 4539 - DNA, 2010 bp, Homo sapiens
  source 1..2010: mol_type = genomic DNA
ggcccgcgggactcagaccagcggggagcgcggcctccgcccttggggccctcccgccgggccggagacccaagcccccaacgccaggccctgccctggaagcgctcgcggcccggcgcctggacgggggagttgctgctctttggcgtaaattgcaatcgattagggatcgtttctcagaatcaagttagaagtgagagttcagataagtgaggccgccattgctgctttgaacacctcagaaggggagaatggatttatcaggagtgaaaaagaagagcttgctaggagtcaaagaaaataataaaaagtccagcactagggctccttcacctaccaaacgcaaagaccgctcagatgagaagtccaaggatcgctcaaaagataaaggggccaccaaggagtcgagtgagaaggatcgcggccgggacaaaacccgaaagaggcgcagcgcttccagtggtagcagcagtaccaggtctcggtccagctcgacttccagctcaggctccagcaccagcactggctcaagcagtggctccagctcttcctcagcatccagccgctcaggaagctccagcacctcccgcagctccagctctagcagctcttctggctctccaagtccttctcggcgcagacacgacaacaggaggcgctcccgctccaaatccaaaccacctaaaagagatgaaaaggagaggaaaaggcggagcccatctcctaagcccaccaaagtgcacattgggagactcacccggaatgtgacaaaggatcacatcatggagatattttccacctatgggaaaattaaaatgattgacatgcccgtggaaaggatgcatccccatctgtccaaaggctatgcgtacgtagagtttgagaatccagatgaagccgagaaggcgctgaagcacatggatggaggacaaattgatggccaggagatcactgccaccgccgtgctggccccctggcctaggccaccccccaggagattcagccctcccaggagaatgttgccaccaccgcctatgtggcgcaggtctcccccacggatgaggagaaggtcccgctccccgaggcgcaggtcccccgtgcgccggagatcacggtccccgggccgccgccgccacaggagccgctccagctccaactcctcccgataaacaggccactgaagctctcgcccctgtaacttataccccacccagctcagttttgtcacttttctagccaaaggaagaccagtaggaaagcaaacccttgactctggcaggatttgcaggcagcaggcagcacccctctgccagccgggccccggctgcagaagtgctgttggtttggatgctgtgtgcctgtcaagattccctccggttttctggctagaaagctcatccgtttccggtttctaagagtcagttcagtggcagagccaccagggaaaagtgaggctcttgggggtggtttgaccctgcttacctgggagcacacttttcccttccccgatgacctgggatggtggccaggccgtgcccttgctgttgctgggcagtgtccttttggaaagggagctgccccaggctttagtgcagctgccaaccctgttaggcctggcctctcgaggcctcttctgacctcaagggtcacaccccctcaaagatcctctcacccatggtagttgctgctcgtggttctgtctgtccgtgcaccgatgcacacaccgcaccccaccactgtactctgaaattggcgagtgagtggagagccagctctgcggagtcatcacgcagccatggttgtgcctgccgttcatggtggtctttcaggttatcttggcaacatgtacattgcttttattttttttcttttttgctttcattgtacagtcagtactataaaatttctcttttgagttttatacctttgtagcattttagatgacattgtgtttgtactttgttgtgtagagtggaagaattgtgttgaataaacccaagatcggaatgc

SEQ ID NO: 4540 - DNA, 3110 bp, Homo sapiens
  source 1..3110: mol_type = genomic DNA
aaagggagctgcttccatcccggacttcccagagcctgcctggagcgcgtactcagcggctctcgggtcccagcgtcccagccgcggcccgcgctcctccgccccgctcctcctcctcctcttcctcctcctcctcctctctaggcacccccgtcccctccttccagcggctgcagcccccagccccaactctccgcgcttactcctgggacgcgcgtcctcgccccatcctttgcttccttccttccttccttcttccttcctcccctggctcccgccctccctctccaggtcgccctcccggggcccgattgtctcggtgccccgctcccggcccgcgccctgccccgtctctcccttgcacttcctgagtcgcccgccgccgccgtcgcagactcgccgcgggagccccagcccaacccgagcccgacagccactgccccggctccagctccagccccacagcccgcggcgcccgcccgagggagccccggcgcccggggaaggctccagtgggctagcgcgccctcgcccagccccgcgccccagccctgcccggcccggcgaggaaggaccgggaagatgaacaacggcggcaaagccgagaaggagaacaccccgagcgaggccaaccttcaggaggaggaggtccggaccctatttgtcagtggccttcctctggatatcaaacctcgggagctctatctgcttttcagaccatttaagggctatgagggttctcttataaagctcacatctaaacagcctgtaggttttgtcagttttgacagtcgctcagaagcagaggctgcaaagaatgctttgaatggcatccgcttcgatcctgaaattccgcaaacactacgactagagtttgctaaggcaaacacgaagatggccaagaacaaactcgtagggactccaaaccccagtactcctctgcccaacactgtacctcagttcattgccagagagccatatgagctcacagtgcctgcactttaccccagtagccctgaagtgtgggccccgtaccctctgtacccagcggagttagcgcctgctctacctcctcctgctttcacctatcccgcttcactgcatgcccagatgcgctggctccctccctccgaggctacttctcagggctggaagtcccgtcagttctgctgaatactatacccttcagcaatggctactagaaggacgaacaattgccctcctttggaagtacggctaatagaagccctagatccgaataagatccgaataagaatatgtaatggaccaggcgcagtgcctcacgcctgtcatcccagcactttgggaggctgaggcaggcggatcacttgatgccagaagtttgagaccagcccagccaacatggtcccaggtgtgtgatggcggctgcaatctgtcttgtgggtattaatgcaatcttcagtggtggctactgttctctagctgttctacaaaactggagcatgctggcttgaaaaacccttgcccagttttgatcccttcaagactttgtcacagcctctatcacacatctgtttttctcgaagaaaaaaatataattaataaaaatgttttactcttttacactgtataattgtaagaaatagcgtattatttgtgaatgcatggtctgaaatttctgtacagtttggagatattttcaaacgaaacgtaagagaagtcaacaataaaaccaagaaaagtgagtatttttataccaaacattttaagtatgctgggatggacgatcttacactggtttggatcacagtttttgttcttgacttttgaatgcttgtaattaaaaatatctatttttttcctctgaagtaagttgcatgtttgaggcatgtttccaaatattatcaaaatatcctgaattgtattgtgaatatatagaaatctgtgcctggccggagtccagggtaaattagtagcatggtgttagatgttagaaacagaactgttatttgcagtgttaggtctaggatcccagttctagtaggacagccctgcaagacaatcaaccagaagcctccaggagcttctacctatggcttattcacaactgggcaagaaaacatcattggtaagaactgctgagtgtgcccttagaaagccctagtagctccagctgtgactatatcaactgtgtgccaagtgtgactttgtacagttttatgtttccactctcctgtatgtgtagccactcgatgcctaacctaccttccacaagccagccccgcatccctgctcccgcagtgtaagtgcagagcctgcctcactggtaagggaaaaccttggcttgggaggccagccctggcccttgaaggggttggctgtgcccagcccacctggctgcagtgggcagctcatgtctgtatctccaaagtgatgtttgtttgcaaaacaccggctgaactgagctggtgttgccaactcttggcagcactgggccaaaccgaccacataccatgagctcccaaatggcgtgtgctcactgtgagacgtcctgccacaccccacaggagacggaggcagtgggcatttggaaccaattctattcagacttcgtcaaagccaaagtcagtctggtgttgtcagttgacacatctccagagttcatgacagctcaacctctccccttgtacagaagccatttttgtaaaaccacactgacctaaattcagctgccaaacacagtctttcctattgatccgctcggcttatgttgaaaatttcaatgtcatgattacctggttggtttgggtttttgttttgttattttccattagaaatataaagatgtcaagaagcttttaaaggtcaacacaaaaaaccaaggccaggagtgaggggctctttcttaccgtaaataaggggaaaaggcagttagctcaaggacttgtgacggatccactttggtgttcaaggacctgcttatgccctcagtgccaatcggctcttggtgagatgactgtactcctaaggaaaatagccacttctgcagtctattatgcttttataactgtttaaaggtacttttctattgtcatttttaaaaaataaagtgcttattccagctgtca

SEQ ID NO: 4541 - DNA, 2974 bp, Homo sapiens
  source 1..2974: mol_type = genomic DNA
atcccggacttcccagagcctgcctggagcgcgtactcagcggctctcgggtcccagcgtcccagccgcggcccgcgctcctccgccccgctcctcctcctcctcttcctcctcctcctcctctctaggcacccccgtcccctccttccagcggctgcagcccccagccccaactctccgcgcttactcctgggacgcgcgtcctcgccccatcctttgcttccttccttccttccttcttccttcctcccctggctcccgccctccctctccaggtcgccctcccggggcccgattgtctcggtgccccgctcccggcccgcgccctgccccgtctctcccttgcacttcctgagtcgcccgccgccgccgtcgcagactcgccgcgggagccccagcccaacccgagcccgacagccactgccccggctccagctccagccccacagcccgcggcgcccgcccgagggagccccggcgcccggggaaggctccagtgggctagcgcgccctcgcccagccccgcgccccagccctgcccggcccggcgaggaaggaccgggaagatgaacaacggcggcaaagccgagaaggagaacaccccgagcgaggccaaccttcaggaggaggaggtccggaccctatttgtcagtggccttcctctggatatcaaacctcgggagctctatctgcttttcagaccatttaagggctatgagggttctcttataaagctcacatctaaacagcctgtaggttttgtcagttttgacagtcgctcagaagcagaggctgcaaagaatgctttgaatggcatccgcttcgatcctgaaattccgcaaacactacgactagagtttgctaaggcaaacacgaagatggccaagaacaaactcgtagggactccaaaccccagtactcctctgcccaacactgtacctcagttcattgccagagagccatatgagctcacagtgcctgcactttaccccagtagccctgaagtgtgggccccgtaccctctgtacccagcggagttagcgcctgctctacctcctcctgctttcacctatcccgcttcactgcatgcccagctctgtgaaggtcagactgtgaggagaagccaccccttgagcgctccgtctcctgatagtgccagcctggcctggtttcctgtttgatgcgctggctccctccctccgaggctacttctcagggctggaagtcccgtcagttctgctgaatactatgtcccaggtgtgtgatggcggctgcaatctgtcttgtgggtattaatgcaatcttcagtggtggctactgttctctagctgttctacaaaactggagcatgctggcttgaaaaacccttgcccagttttgatcccttcaagactttgtcacagcctctatcacacatctgtttttctcgaagaaaaaaatataattaataaaaatgttttactcttttacactgtataattgtaagaaatagcgtattatttgtgaatgcatggtctgaaatttctgtacagtttggagatattttcaaacgaaacgtaagagaagtcaacaataaaaccaagaaaagtgagtatttttataccaaacattttaagtatgctgggatggacgatcttacactggtttggatcacagtttttgttcttgacttttgaatgcttgtaattaaaaatatctatttttttcctctgaagtaagttgcatgtttgaggcatgtttccaaatattatcaaaatatcctgaattgtattgtgaatatatagaaatctgtgcctggccggagtccagggtaaattagtagcatggtgttagatgttagaaacagaactgttatttgcagtgttaggtctaggatcccagttctagtaggacagccctgcaagacaatcaaccagaagcctccaggagcttctacctatggcttattcacaactgggcaagaaaacatcattggtaagaactgctgagtgtgcccttagaaagccctagtagctccagctgtgactatatcaactgtgtgccaagtgtgactttgtacagttttatgtttccactctcctgtatgtgtagccactcgatgcctaacctaccttccacaagccagccccgcatccctgctcccgcagtgtaagtgcagagcctgcctcactggtaagggaaaaccttggcttgggaggccagccctggcccttgaaggggttggctgtgcccagcccacctggctgcagtgggcagctcatgtctgtatctccaaagtgatgtttgtttgcaaaacaccggctgaactgagctggtgttgccaactcttggcagcactgggccaaaccgaccacataccatgagctcccaaatggcgtgtgctcactgtgagacgtcctgccacaccccacaggagacggaggcagtgggcatttggaaccaattctattcagacttcgtcaaagccaaagtcagtctggtgttgtcagttgacacatctccagagttcatgacagctcaacctctccccttgtacagaagccatttttgtaaaaccacactgacctaaattcagctgccaaacacagtctttcctattgatccgctcggcttatgttgaaaatttcaatgtcatgattacctggttggtttgggtttttgttttgttattttccattagaaatataaagatgtcaagaagcttttaaaggtcaacacaaaaaaccaaggccaggagtgaggggctctttcttaccgtaaataaggggaaaaggcagttagctcaaggacttgtgacggatccactttggtgttcaaggacctgcttatgccctcagtgccaatcggctcttggtgagatgactgtactcctaaggaaaatagccacttctgcagtctattatgcttttataactgtttaaaggtacttttctattgtcatttttaaaaaataaagtgcttattccagctgtca

SEQ ID NO: 4542 - DNA, 1341 bp, Homo sapiens
  source 1..1341: mol_type = genomic DNA
aaagggagctgcttccatcccggacttcccagagcctgcctggagcgcgtactcagcggctctcgggtcccagcgtcccagccgcggcccgcgctcctccgccccgctcctcctcctcctcttcctcctcctcctcctctctaggcacccccgtcccctccttccagcggctgcagcccccagccccaactctccgcgcttactcctgggacgcgcgtcctcgccccatcctttgcttccttccttccttccttcttccttcctcccctggctcccgccctccctctccaggtcgccctcccggggcccgattgtctcggtgccccgctcccggcccgcgccctgccccgtctctcccttgcacttcctgagtcgcccgccgccgccgtcgcagactcgccgcgggagccccagcccaacccgagcccgacagccactgccccggctccagctccagccccacagcccgcggcgcccgcccgagggagccccggcgcccggggaaggctccagtgggctagcgcgccctcgcccagccccgcgccccagccctgcccggcccggcgaggaaggaccgggaagatgaacaacggcggcaaagccgagaaggagaacaccccgagcgaggccaaccttcaggaggaggaggtccggaccctatttgtcagtggccttcctctggatatcaaacctcgggagctctatctgcttttcagaccatttaagggctatgagggttctcttataaagctcacatctaaacagcctgtaggttttgtcagttttgacagtcgctcagaagcagaggctgcaaagaatgctttgaatggcatccgcttcgatcctgaaattccgcaaacactacgactagagtttgctaaggcaaacacgaagatggccaagaacaaactcgtagggactccaaaccccagtactcctctgcccaacactgtacctcagttcattgccagagagccatatgagctcacagtgcctgcactttaccccagtagccctgaagtgtgggccccgtaccctctgtacccagcggagttagcgcctgctctacctcctcctgctttcacctatcccgcttcactgcatgcccagtgtttctctcctgaggcaaagcccaacacacctgtcttttgtccacttctccagcaaattagatttgtctctgggaatgtgtttgtaacataccaacctactgcagaccagcagagggagctcccatgttgaatttgtttgttagctattttcccccctttcacaaaaactatttcttgacgacctttgagagatttcaataaaaattttaatcagagcaaaaatgaactc

SEQ ID NO: 4543 - DNA, 2819 bp, Homo sapiens
  source 1..2819: mol_type = genomic DNA
ggcagcccacgtccagggagggcggagggaggaggagaggcgcggagaggagggaggggagaggggagggaggaaggcgagagaaagggagctgcttccatcccggacttcccagagcctgcctggagcgcgtactcagcggctctcgggtcccagcgtcccagccgcggcccgcgctcctccgccccgctcctcctcctcctcttcctcctcctcctcctctctaggcacccccgtcccctccttccagcggctgcagcccccagccccaactctccgcgcttactcctgggacgcgcgtcctcgccccatcctttgcttccttccttccttccttcttccttcctcccctggctcccgccctccctctccaggtcgccctcccggggcccgattgtctcggtgccccgctcccggcccgcgccctgccccgtctctcccttgcacttcctgagtcgcccgccgccgccgtcgcagactcgccgcgggagccccagcccaacccgagcccgacagccactgccccggctccagctccagccccacagcccgcggcgcccgcccgagggagccccggcgcccggggaaggctccagtgggctagcgcgccctcgcccagccccgcgccccagccctgcccggcccggcgaggaaggaccgggaagatgaacaacggcggcaaagccgagaaggagaacaccccgagcgaggccaaccttcaggaggaggaggtccggaccctatttgtcagtggccttcctctggatatcaaacctcgggagctctatctgcttttcagaccatttaagggctatgagggttctcttataaagctcacatctaaacagcctgtaggttttgtcagttttgacagtcgctcagaagcagaggctgcaaagaatgctttgaatggcatccgcttcgatcctgaaattccgcaaacactacgactagagtttgctaaggcaaacacgaagatggccaagaacaaactcgtagggactccaaaccccagtactcctctgcccaacactgtacctcagttcattgccagagagccattgatgcgctggctccctccctccgaggctacttctcagggctggaagtcccgtcagttctgctgaatactatgtcccaggtgtgtgatggcggctgcaatctgtcttgtgggtattaatgcaatcttcagtggtggctactgttctctagctgttctacaaaactggagcatgctggcttgaaaaacccttgcccagttttgatcccttcaagactttgtcacagcctctatcacacatctgtttttctcgaagaaaaaaatataattaataaaaatgttttactcttttacactgtataattgtaagaaatagcgtattatttgtgaatgcatggtctgaaatttctgtacagtttggagatattttcaaacgaaacgtaagagaagtcaacaataaaaccaagaaaagtgagtatttttataccaaacattttaagtatgctgggatggacgatcttacactggtttggatcacagtttttgttcttgacttttgaatgcttgtaattaaaaatatctatttttttcctctgaagtaagttgcatgtttgaggcatgtttccaaatattatcaaaatatcctgaattgtattgtgaatatatagaaatctgtgcctggccggagtccagggtaaattagtagcatggtgttagatgttagaaacagaactgttatttgcagtgttaggtctaggatcccagttctagtaggacagccctgcaagacaatcaaccagaagcctccaggagcttctacctatggcttattcacaactgggcaagaaaacatcattggtaagaactgctgagtgtgcccttagaaagccctagtagctccagctgtgactatatcaactgtgtgccaagtgtgactttgtacagttttatgtttccactctcctgtatgtgtagccactcgatgcctaacctaccttccacaagccagccccgcatccctgctcccgcagtgtaagtgcagagcctgcctcactggtaagggaaaaccttggcttgggaggccagccctggcccttgaaggggttggctgtgcccagcccacctggctgcagtgggcagctcatgtctgtatctccaaagtgatgtttgtttgcaaaacaccggctgaactgagctggtgttgccaactcttggcagcactgggccaaaccgaccacataccatgagctcccaaatggcgtgtgctcactgtgagacgtcctgccacaccccacaggagacggaggcagtgggcatttggaaccaattctattcagacttcgtcaaagccaaagtcagtctggtgttgtcagttgacacatctccagagttcatgacagctcaacctctccccttgtacagaagccatttttgtaaaaccacactgacctaaattcagctgccaaacacagtctttcctattgatccgctcggcttatgttgaaaatttcaatgtcatgattacctggttggtttgggtttttgttttgttattttccattagaaatataaagatgtcaagaagcttttaaaggtcaacacaaaaaaccaaggccaggagtgaggggctctttcttaccgtaaataaggggaaaaggcagttagctcaaggacttgtgacggatccactttggtgttcaaggacctgcttatgccctcagtgccaatcggctcttggtgagatgactgtactcctaaggaaaatagccacttctgcagtctattatgcttttataactgtttaaaggtacttttctat

SEQ ID NO: 4544 - DNA, 2941 bp, Homo sapiens
  source 1..2941: mol_type = genomic DNA
gggaggggagaggggagggaggaaggcgagagaaagggagctgcttccatcccggacttcccagagcctgcctggagcgcgtactcagcggctctcgggtcccagcgtcccagccgcggcccgcgctcctccgccccgctcctcctcctcctcttcctcctcctcctcctctctaggcacccccgtcccctccttccagcggctgcagcccccagccccaactctccgcgcttactcctgggacgcgcgtcctcgccccatcctttgcttccttccttccttccttcttccttcctcccctggctcccgccctccctctccaggtcgccctcccggggcccgattgtctcggtgccccgctcccggcccgcgccctgccccgtctctcccttgcacttcctgagtcgcccgccgccgccgtcgcagactcgccgcgggagccccagcccaacccgagcccgacagccactgccccggctccagctccagccccacagcccgcggcgcccgcccgagggagccccggcgcccggggaaggctccagtgggctagcgcgccctcgcccagccccgcgccccagccctgcccggcccggcgaggaaggaccgggaagatgaacaacggcggcaaagccgagaaggagaacaccccgagcgaggccaaccttcaggaggaggaggtccggaccctatttgtcagtggccttcctctggatatcaaacctcgggagctctatctgcttttcagaccatttaagggctatgagggttctcttataaagctcacatctaaacagcctgtaggttttgtcagttttgacagtcgctcagaagcagaggctgcaaagaatgctttgaatggcatccgcttcgatcctgaaattccgcaaacactacgactagagtttgctaaggcaaacacgaagatggccaagaacaaactcgtagggactccaaaccccagtactcctctgcccaacactgtacctcagttcattgccagagagccatatgagctcacagtgcctgcactttaccccagtagccctgaagtgtgggccccgtaccctctgtacccagcggagttagcgcctgctctacctcctcctgctttcacctatcccgcttcactgcatgcccagatgcgctggctccctccctccgaggctacttctcagggctggaagtcccgtcagttctgctgaatactatgtcccaggtgtgtgatggcggctgcaatctgtcttgtgggtattaatgcaatcttcagtggtggctactgttctctagctgttctacaaaactggagcatgctggcttgaaaaacccttgcccagttttgatcccttcaagactttgtcacagcctctatcacacatctgtttttctcgaagaaaaaaatataattaataaaaatgttttactcttttacactgtataattgtaagaaatagcgtattatttgtgaatgcatggtctgaaatttctgtacagtttggagatattttcaaacgaaacgtaagagaagtcaacaataaaaccaagaaaagtgagtatttttataccaaacattttaagtatgctgggatggacgatcttacactggtttggatcacagtttttgttcttgacttttgaatgcttgtaattaaaaatatctatttttttcctctgaagtaagttgcatgtttgaggcatgtttccaaatattatcaaaatatcctgaattgtattgtgaatatatagaaatctgtgcctggccggagtccagggtaaattagtagcatggtgttagatgttagaaacagaactgttatttgcagtgttaggtctaggatcccagttctagtaggacagccctgcaagacaatcaaccagaagcctccaggagcttctacctatggcttattcacaactgggcaagaaaacatcattggtaagaactgctgagtgtgcccttagaaagccctagtagctccagctgtgactatatcaactgtgtgccaagtgtgactttgtacagttttatgtttccactctcctgtatgtgtagccactcgatgcctaacctaccttccacaagccagccccgcatccctgctcccgcagtgtaagtgcagagcctgcctcactggtaagggaaaaccttggcttgggaggccagccctggcccttgaaggggttggctgtgcccagcccacctggctgcagtgggcagctcatgtctgtatctccaaagtgatgtttgtttgcaaaacaccggctgaactgagctggtgttgccaactcttggcagcactgggccaaaccgaccacataccatgagctcccaaatggcgtgtgctcactgtgagacgtcctgccacaccccacaggagacggaggcagtgggcatttggaaccaattctattcagacttcgtcaaagccaaagtcagtctggtgttgtcagttgacacatctccagagttcatgacagctcaacctctccccttgtacagaagccatttttgtaaaaccacactgacctaaattcagctgccaaacacagtctttcctattgatccgctcggcttatgttgaaaatttcaatgtcatgattacctggttggtttgggtttttgttttgttattttccattagaaatataaagatgtcaagaagcttttaaaggtcaacacaaaaaaccaaggccaggagtgaggggctctttcttaccgtaaataaggggaaaaggcagttagctcaaggacttgtgacggatccactttggtgttcaaggacctgcttatgccctcagtgccaatcggctcttggtgagatgactgtactcctaaggaaaatagccacttctgcagtctattatgcttttataactgtttaaaggtacttttctattgtcatttttaaaaaataaagtgcttattccagctgtcacacca

SEQ ID NO: 4545 - DNA, 2008 bp, Homo sapiens
  source 1..2008: mol_type = genomic DNA
actcgccggtcgcagtgaaaaggcggaggcggcggcccctccggctcccactgcctcccccgccgcaccccctccccaccttccgcacccgccaaacttgatgtgaccctggcccgacgcggaggctgcccctctcactgccccgtgggtcccccgccacccgctccgcacccgcgagcgcaccgctccccgcgccccttcccacttcccgcggggccggcgccgcgctcgccctcgcgttccttcccgccgccccctcccccgcaccatgagcaacctgaagccggacggcgagcacggcggcagcaccggcaccggctccggcgcgggctccggcggcgccctggaggaggaggtccggacactgtttgtcagcggcctccctgtggacattaaacccagagaactctacttgctcttccggccgttcaaggggtatgaagggtccctgatcaagctcactgcaagacagcctgttggttttgtgatctttgacagccgtgcaggagcagaagcggccaagaatgcgctgaacggtattcgctttgatcccgaaaatccacagactctgaggctagagtttgccaaagccaacaccaagatggccaagagcaagctaatggcaactccaaatcccagcaacgtgcaccccgccctaggagcacacttcatcgcacgggacccctatgacctgatgggggctgctctgatccctgcatccccagaggcctgggccccctaccctttgtacaccacagagctgaccccagccatctcccatgctgcgttcacctacccaactgccactgccgctgccgccgccctccacgctcaggtgcgctggtacccttcctctgacaccacccagcaaggatggaagtaccgtcagttctgttagtttttcagtctggtcaccggggaggtggttctggtaatctgtggtggtgccgggacaggcgccccgagttcccactgcccccgggcggcctgcacagagctgctgccctccagagactgtgaatcccaagcctgactcagtggactgcttcctgttcccctccctcctcttcctcaccttgttctgcaccctcaagcctttctccaatgcctcccaggaggatttggggactttctccctggggcgcccagatccagctcggaggcctcactgggacctggcaaggcctgacctcccgcccaaacttgcttctgtagctccccctcgaggaagtgaggtgtttaattttgcatgttttctggcatgaattaagacacttatacttgtatatatgagtgtacagtttgttctcacactgtcaccatagcgacaggtcctggctcccagtggttcatcctgcctgcccctctctcctcgccccgcccctgcacccaccccgcttcagggaggcccaagttccgtggccccacacgcttccaggctcagctcccacctccacccaacagatagatggggtttgctttttcatttcacatggggctcctccgctcctgccttctcggatgggccaacagtcgtaagaaagccctctctgcccgttctgttcacctctccacagcgcaccccgcccgccgctgctcctcattctttccaaacctcgaaaccaaccaaaacgtgagaagtatttttgtaccctgtgtaacaaaatatttatgcatcataaaggatttttcatgtgcgtaccattaattattaaagcgacctcgttcgccctgtcagataagtttaatgtttagtttgaggcatgaagaagaaaagggtttccattcttcagcagtacgcctttgtgtctggcatttgtttaagaaaatgaaatgaaggaaacactgtgcaatgttttttgttttgagcatatcagtgctttactgtcagccgcagctgtgaccgtctggccatttcagacttgggagatgaggcggctgttgtcattgctgatcctgtgagaatgtgaaactggataatatatgaaatgcaaaataaaacaaaacc

SEQ ID NO: 4546 - DNA, 1789 bp, Homo sapiens
  source 1..1789: mol_type = genomic DNA
ggctgcagactcctcgtgctcgtgtcaccgtgtccttcccaggagacagagaaggaggagagcccggaaccagggccggagcggcgggcggagccgagctgcggggagccgctccgggtgcccccacccccgcgcgcctcagtggtgccggccgagggcagggctcgcggttgcggggctcgcgccgctgtcagtgcggcggggcgcgcgagcggcgccagctcggggcagcggaacccagagaagctgagggggcggtagcggcggcgacggcgacgacgacgactcccgcgcgtgtgcccagcctcttcccgccgcagccgcccttttcctccctcccttacgtccccgagtgcggcagtaccgcctccttcccagccgcgcggcttcctccagacctctcggcgcgggtgagccctattcccagaggcaggtggtgctgaccctgtaacccaaaggaggaaacagctggctaagctcatcattgttactggtgggcaccatgtccttgaagcttcaggcaagcaatgtaaccaacaagaatgaccccaagtccatcaactctcgagtcttcattggaaacctcaacacagctctggtgaagaaatcagatgtggagaccatcttctctaagtatggccgtgtggccggctgttctgtgcacaagggctatgcctttgttcagtactccaatgagcgccatgcccgggcagctgtgctgggagagaatgggcgggtgctggccgggcagaccctggacatcaacatggctggagagcctaagcctgacagacccaaggggctaaagagagcagcatctgccatatacagtggctacatctttgactatgattactaccgggacgacttctacgacaggctcttcgactaccggggccgtctgtcgcccgtgccagtgcccagggcggtccctgtgaagcgaccccgggtcacagtccctttggtccggcgtgtcaaaactaacgtacctgtcaagctctttgcccgctccacagctgtcaccaccagctcagccaagatcaagttaaagagcagtgagctgcaggccatcaagacggagctgacacagatcaagtccaatatcgatgccctgctgagccgcttggagcagatcgctgcggagcaaaaggccaatccagatggcaagaagaagggtgatggaggtggcgccggcggcggcggcggtggtggtggcagcggtggcggtggcagtggtggtggcggtggcggtggcagcagccggccaccagccccccaagagaacacaacttctgaggcaggcctgccccagggggaagcacggacccgagacgacggcgatgaggaagggctcctgacacacagcgaggaagagctggaacacagccaggacacagacgcggatgatggggccttgcagtaagcagcctgacaggagcaatggccaccagcaggtgaagggcatcgctgccccaggcctcaagccgggcacccaaccctggatgccaccccccagcgggtaccagaggaaagctggcagcaggcgcctcctcccccaacgcatcccagccagtgccatgtcctctgcaggtggagttactggcctactccttccccatgagccctccctgtctgcactgcccaggccagagggtagagcacaggggtttccccatactacctcccctccccaggacactcccaggcttgggttttttctataggtttggcggggggccacagggaggggaccctgacaataaagagattggatcccaacctgttctga

SEQ ID NO: 4547 - DNA, 871 bp, Homo sapiens
  source 1..871: mol_type = genomic DNA
gcaactttcattccctctgaaataaaacagtgcttaggccagtacctagtctgtttccaactgtgcggtgagccctattcccagaggcaggtggtgctgaccctgtaacccaaaggaggaaacagctggctaagctcatcattgttactggtgggcaccatgtccttgaagcttcaggcaagcaatgtaaccaacaagaatgaccccaagtccatcaactctcgagtcttcattggaaacctcaacacagctctggtgaagaaatcagatgtggagaccatcttctctaagtatggccgtgtggccggctgttctgtgcacaagggctatgcctttgttcagtactccaatgagcgccatgcccgggcagctgtgctgggagagaatgggcgggtgctggccgggcagaccctggacatcaacatggctggagagcctaagcctgacagacccaaggggctaaagagagcagcatctgccatatacaggctcttcgactaccggggccgtctgtcgcccgtgccagtgcccagggcggtccctgtgaagcgaccccgggtcacagtccctttggtccggcgtgtcaaaactaacgtacctgtcaagctctttgcccgctccacagctgtcaccaccagctcagccaagatcaagttaaagagcagtgagctgcaggccatcaagacggagctgacacagatcaagtccaatatcgatgccctgctgagccgcttggagcagatcgctgcggagcaaaaggccaatccagatggcaagaagaagggtgatggaggtggcgccggcggcggcggcggtggtggtggcagcggtggcggtggcagtggtggtggcggtggcggtggcagcagcc

SEQ ID NO: 4548 - DNA, 1204 bp, Homo sapiens
  source 1..1204: mol_type = genomic DNA
ggagagcccatgcgcctgggaagccgggctgtttctgggcggggctgcagactcctcgtgctcgtgtcaccgtgtccttcccaggagacagagaaggaggagagcccggaaccagggccggagcggcgggcggagccgagctgcggggagccgctccgggtgcccccacccccgcgcgcctcagtggtgccggccgagggcagggctcgcggttgcggggctcgcgccgctgtcagtgcggcggggcgcgcgagcggcgccagctcggggcagcggaacccagagaagctgagggggcggtagcggcggcgacggcgacgacgacgactcccgcgcgtgtgcccagcctcttcccgccgcagccgcccttttcctccctcccttacgtccccgagtgcggcagtaccgcctccttcccagccgcgcggcttcctccagacctctcggcgcgggtgagccctattcccagaggcaggtggtgctgaccctgtaacccaaaggaggaaacagctggctaagctcatcattgttactggttcccagagagggggcttcttgaaaagcaagtagagcagaagactggtgagcacggtgtttcccagcatctccacagtgccagcacagaggaggacactcaagaaatgtttgttaagtgggcaccatgtccttgaagcttcaggcaagcaatgtaaccaacaagaatgaccccaagtccatcaactctcgagtcttcattggaaacctcaacacagctctggtgaagaaatcagatgtggagaccatcttctctaagtatggccgtgtggccggctgttctgtgcacaagggctatgcctttgttcagtactccaatgagcgccatgcccgggcagctgtgctgggagagaatgggcgggtgctggccgggcagaccctggacatcaacatggctggagagcctaagcctgacagacccaaggggctaaagagagcagcatctgccatatacagtggctacatctttgactatgattactaccgggacgacttctacgacaggctcttcgactaccggggccgtctgtcgcccgtgccagtgcccagggcggtccctgtgaagcgaccccgggtcacagtccctttggtccggcgtgtcaaaactaacgtacctgtcaagctctttgcccgctccacagctgtcaccaccagctcagccaagatcaag

SEQ ID NO: 4549 - DNA, 766 bp, Homo sapiens
  source 1..766: mol_type = genomic DNA
gcggcgggcggagccgagctgcggggagccgctccgggtgcccccacccccgcgcgcctcagtggtgccggccgagggcagggctcgcggttgcggggctcgcgccgctgtcagtgcggcggggcgcgcgagcggcgccagctcggggcagcggaacccagagaagctgagggggcggtagcggcggcgacggcgacgacgacgactcccgcgcgtgtgcccagcctcttcccgccgcagccgcccttttcctccctcccttacgtccccgagtgcggcagtaccgcctccttcccagccgcgcggcttcctccagacctctcggcgcgggtgagccctattcccagaggcaggtggtgctgaccctgtaacccaaaggaggaaacagctggctaagctcatcattgttactgtcttcatttccctatttgtaaagttggagtgcctccctgtcccctcacgtctcatgtgtgtactcctaccatgcaggtgggcaccatgtccttgaagcttcaggcaagcaatgtaaccaacaagaatgaccccaagtccatcaactctcgagtcttcattggaaacctcaacacagctctggtgaagaaatcagatgtggagaccatcttctctaagtatggccgtgtggccggctgttctgtgcacaagggctatgcctttgttcagtactccaatgagcgccatgcccgggcagctgtgctgggagagaatgggcgggtgctggccgggcagaccctggacatcaacatgg

SEQ ID NO: 4550 - DNA, 1817 bp, Homo sapiens
  source 1..1817: mol_type = genomic DNA
tctggacctttccaaagccaggctgagagggtggggagagcccatgcgcctgggaagccgggctgtttctgggcggggctgcagactcctcgtgctcgtgtcaccgtgtccttcccaggagacagagaaggaggagagcccggaaccagggccggagcggcgggcggagccgagctgcggggagccgctccgggtgcccccacccccgcgcgcctcagtggtgccggccgagggcagggctcgcggttgcggggctcgcgccgctgtcagtgcggcggggcgcgcgagcggcgccagctcggggcagcggaacccagagaagctgagggggcggtagcggcggcgacggcgacgacgacgactcccgcgcgtgtgcccagcctcttcccgccgcagccgcccttttcctccctcccttacgtccccgagtgcggcagtaccgcctccttcccagccgcgcggcttcctccagacctctcggcgcgggtgagccctattcccagaggcaggtggtgctgaccctgtaacccaaaggaggaaacagctggctaagctcatcattgttactggtgggcaccatgtccttgaagcttcaggcaagcaatgtaaccaacaagaatgaccccaagtccatcaactctcgagtcttcattggaaacctcaacacagctctggtgaagaaatcagatgtggagaccatcttctctaagtatggccgtgtggccggctgttctgtgcacaagggctatgcctttgttcagtactccaatgagcgccatgcccgggcagctgtgctgggagagaatgggcgggtgctggccgggcagaccctggacatcaacatggctggagagcctaagcctgacagacccaaggggctaaagagagcagcatctgccatatacaggctcttcgactaccggggccgtctgtcgcccgtgccagtgcccagggcggtccctgtgaagcgaccccgggtcacagtccctttggtccggcgtgtcaaaactaacgtacctgtcaagctctttgcccgctccacagctgtcaccaccagctcagccaagatcaagttaaagagcagtgagctgcaggccatcaagacggagctgacacagatcaagtccaatatcgatgccctgctgagccgcttggagcagatcgctgcggagcaaaaggccaatccagatggcaagaagaagggtgatggaggtggcgccggcggcggcggcggtggtggtggcagcggtggcggtggcagtggtggtggcggtggcggtggcagcagccggccaccagccccccaagagaacacaacttctgaggcaggcctgccccagggggaagcacggacccgagacgacggcgatgaggaagggctcctgacacacagcgaggaagagctggaacacagccaggacacagacgcggatgatggggccttgcagtaagcagcctgacaggagcaatggccaccagcaggtgaagggcatcgctgccccaggcctcaagccgggcacccaaccctggatgccaccccccagcgggtaccagaggaaagctggcagcaggcgcctcctcccccaacgcatcccagccagtgccatgtcctctgcaggtggagttactggcctactccttccccatgagccctccctgtctgcactgcccaggccagagggtagagcacaggggtttccccatactacctcccctccccaggacactcccaggcttgggttttttctataggtttggcggggggccacagggaggggaccctgacaataaagagattggatcccaacctgttctga

SEQ ID NO: 4551 - DNA, 3268 bp, Homo sapiens
  source 1..3268: mol_type = genomic DNA
accttccattttggtagcttcaactttgcagctgctgtgtctcttcgtcgtctgggaagaaaactttcacattaagagttgctgatgcggattttctttctttcctctcccggcgttgatgagtgcttggctcctgacagaagggatttggctcccagctttgtagttcggaagaagttgggtctatagatttccccctaactctccattgatgtgttgagcttcagagggaataataactctacgtaaagcatgctggcgtctcaaggagttctcctgcatccttatggcgtgcctatgattgtaccggcagctccttaccttcctggactgattcagggtaatcaggaagcagccgctgcccctgacacaatggctcagccttacgcttcggcccagtttgctcccccgcagaacggtatccccgcggaatacacggcccctcatccccaccccgcgccagagtacacaggccagaccacggttcccgagcacacattaaacctgtaccctcccgcccagacgcactccgagcagagcccggcggacacgagcgctcagaccgtctctggcaccgccacacagacagatgacgcagcaccgacggatggccagccccagacacaaccttctgaaaacacggaaaacaagtctcagcccaagcggctgcatgtctccaatatccccttcaggttccgggatccggacctcagacaaatgtttggtcaatttggtaaaatcttagatgttgaaattatttttaatgagcgaggctcaaagggatttggtttcgtaactttcgaaaatagtgccgatgcggacagggcgagggagaaattacacggcaccgtggtagagggccgtaaaatcgaggtaaataatgccacagcacgtgtaatgacaaataaaaagaccgtcaacccttatacaaatggctggaaattgaatccagttgtgggtgcagtctacagtcccgaattctatgcaggcacggtcctgttgtgccaggccaaccaggagggatcttccatgtacagtgcccccagttcacttgtatatacttctgcaatgccaggcttcccgtatccagcagccaccgccgcggccgcctaccgaggggcgcacctgcgaggccgcggtcgcaccgtgtacaacaccttcagggccgcggcgcccccgcccccgatcccggcctacggcggagtagtgtatcaagagcctgtgtatggcaataaattgctgcagggtggttatgctgcataccgctacgcccagcctacccctgccactgccgctgcctacagtgacagttacggacgagtttatgctgccgacccctaccaccacgcacttgctccagcccccacctacggcgttggtgccatgaatgcttttgcacctttgactgatgccaagactaggagccatgctgatgatgtgggtctcgttctttcttcattgcaggctagtatataccgagggggatacaaccgttttgctccatactaaatgacaaaaccataaaaaccttccaatgtggggagaaaggaagctttccgaggcctgagtattgcaatacatgcagtagtacatcattttagcaactctaaaaaaaaaaaaaatacaaataaaaaggaaaaaaaattacattttttatcttatacctcagatattttgttctgtgtattttaatattgtgggtctttaatttctgaaggttccgtagtttggttgctggctgtaggagtttttgtggttgatctagacagatgctagataatgaataaaaactggtttagggccatatccagagtgctatattatgtaaatgaattatatatgctgaatattaagctactggggttatcagctatttgggaagagtgtaagtgactacagtagtcatttttttctgcacctgcattattttattttgcgaaaggggaggttgggaggggcttaggggattggaactggggtttggctgaaagaaaaaaaaaaaaatgtaactgatgaatctaaacgacccactgcaccaacaatcatttatcaatggttctaagttactcattgccagttcaagccaaaggtcatgttgttaagggggtgcttctagtagcacttgtgcatctgagttgaatgaagctgtgcaaacccaccctttaaaccattccacccggcagtattcagcttcttaaccagtcgctatttaggaaaaaaaacccactagttaggccatcaacaagcattctttttatatttcttccagtataataaattattgatatcactgctgacttttatattatgggagggaaaaaataacattaataaaaaggtgataaaaaagcactgtttctatttttttctttttttccaaaaaaagaaagtaataaaaacttaaattctttgtaccagttaaaaaaaatgtataaaatttacatctgtgcagtggagttgttaagttctagaaacagtctatgaagctttagttttagcctagtagaacaactgttagagacagacgtataatttttatggaattacatgataatcatattcggatttatagaagcattttacaagtattgcaatcattgagtagagataatcatggtattttcatcagcttggtactttttgaaacgtgactgcgttgtgtgaacaatctgcaatttttcagtccgtgagatcctgcccttccacctctttcccatacccccaaggattatctcaaaatgatctctttagttctgtctccaaggcccaggacacttgtcagaaggatgcaaaaaaagaaaaaagtacatccaccctcttaatcccaaaagaacaaagtctccccacctttctcggatgcagggccagagtgacacagccgaaaaattgcagtttgtctgtacttctgtttgaactttccacgttgtcctgtttacaagttaacttaagttggggtatccgtcacgggtcttcctgttttgtatttaaataaaaacaacagcagcaggctgtccctgagtagttttgctgccataggttaagtcctcatgtgtacagtgcaggccctgtggcccgcacttcagtaagttatcaactctcaccgctgtgaacctgccaatccgctgtaacaactctgctttaaaacaaaaccaaacaaaactttaaaaaaaaatgtgtgatccagctttctcttgccatcctatgtgcatgccgtaagatcagttggatattaaaccatcaataaagtttcacaagatttgaaaacaaa

SEQ ID NO: 4552 - DNA, 2277 bp, Homo sapiens
  source 1..2277: mol_type = genomic DNA
tccggctctcctttgtttattttctaatctatatttttactggaagatttcctctttattctctcccgccctcctacaagcgctcttgctggccgtctgggtgcacacaccgctccctcgatcaccccagcccccttcctggtctcccgagcgcggggtttgaaggtcacctcctttccagtccccgtgcgagccgcgctgccgccgcctcctccagccagagtcggtgggactggctgcgctgccctgaagtggttctccaagcagcgcggagggtggcggacggcggacggagcccaggggccgcgtcgggtggggaaacccgaactcgcggaggggaatccctccccctccgccccagccccccagcagcacccgcggtggggcgggggcgctctgccagccccgggaacagcagaggcggcggcactggctggacccacgcgcgcgcctccggggctgaagaaggaaggagtgagccgagccgagcaccccacatctggaggggacagccagccgtgggccccgccccggcgtccggagcaggagaactccgagcttcttgcccaggcagagagagcaggagcggaccgcgcgcccgggattgagagtccttgcgctccagacccccacccagtggccgccagggtccccgcctgtccggaccctcgccgcgcccaggcaggcgcgccagggcggggctgacctgcccgcgaagttgcggacagtgcgtgagaaaccagcacccccttccgccgcctccagcttatggtgagtgtggctgggggtgcagagagcgcacgggaattcgggggtctggggccgagaacgtgaccgcagccgggctcgccgggagttctaggaaactggtcaaagaactcatgcaagtggaacttacagcttccttgatcggactcagcattcagatatcaaagcagactgcaatacctgcgtggaaatagaagacagaaaggtttcaagacaacagatgaattgtgaaagagagcagctaaggggtaatcaggaagcagccgctgcccctgacacaatggctcagccttacgcttcggcccagtttgctcccccgcagaacggtatccccgcggaatacacggcccctcatccccaccccgcgccagagtacacaggccagaccacggttcccgagcacacattaaacctgtaccctcccgcccagacgcactccgagcagagcccggcggacacgagcgctcagaccgtctctggcaccgccacacagacagatgacgcagcaccgacggatggccagccccagacacaaccttctgaaaacacggaaaacaagtctcagcccaagcggctgcatgtctccaatatccccttcaggttccgggatccggacctcagacaaatgtttggtcaatttggtaaaatcttagatgttgaaattatttttaatgagcgaggctcaaagggatttggtttcgtaactttcgaaaatagtgccgatgcggacagggcgagggagaaattacacggcaccgtggtagagggccgtaaaatcgaggtaaataatgccacagcacgtgtaatgacaaataaaaagaccgtcaacccttatacaaatggctggaaattgaatccagttgtgggtgcagtctacagtcccgaattctatgcaggcacggtcctgttgtgccaggccaaccaggagggatcttccatgtacagtgcccccagttcacttgtatatacttctgcaatgccaggcttcccgtatccagcagccaccgccgcggccgcctaccgaggggcgcacctgcgaggccgcggtcgcaccgtgtacaacaccttcagggccgcggcgcccccgcccccgatcccggcctacggcggtgttgtttaccaggatggattttatggtgcagacatttatggtggttatgctgcataccgctacgcccagcctacccctgccactgccgctgcctacagtgacagttacggacgagtttatgctgccgacccctaccaccacgcacttgctccagcccccacctacggcgttggtgccatgaatgcttttgcacctttgactgatgccaagactaggagccatgctgatgatgtgggtctcgttctttcttcattgcaggctagtatataccgagggggatacaaccgttttgctccatactaaatgacaaaaccataaaaaccttccaatgtggggagaaaggaagctttccgaggcctgagtattgcaatacatgcagtagtacatcattttagcaa

SEQ ID NO: 4553 - DNA, 3321 bp, Homo sapiens
  source 1..3321: mol_type = genomic DNA
accttccattttggtagcttcaactttgcagctgctgtgtctcttcgtcgtctgggaagaaaactttcacattaagagttgctgatgcggattttctttctttcctctcccggcgttgatgagtgcttggctcctgacagaagggatttggctcccagctttgtagttcggaagaagttgggtctatagatttccccctaactctccattgatgtgttgagcttcagagggaataataactctacgtaaagcatgctggcgtctcaaggagttctcctgcatccttatggcgtgcctatgattgtaccggcagctccttaccttcctggactgattcagggtaatcaggaagcagccgctgcccctgacacaatggctcagccttacgcttcggcccagtttgctcccccgcagaacggtatccccgcggaatacacggcccctcatccccaccccgcgccagagtacacaggccagaccacggttcccgagcacacattaaacctgtaccctcccgcccagacgcactccgagcagagcccggcggacacgagcgctcagaccgtctctggcaccgccacacagacagatgacgcagcaccgacggatggccagccccagacacaaccttctgaaaacacggaaaacaagtctcagcccaagcggctgcatgtctccaatatccccttcaggttccgggatccggacctcagacaaatgtttggtcaatttggtaaaatcttagatgttgaaattatttttaatgagcgaggctcaaagggatttggtttcgtaactttcgaaaatagtgccgatgcggacagggcgagggagaaattacacggcaccgtggtagagggccgtaaaatcgaggtaaataatgccacagcacgtgtaatgacaaataaaaagaccgtcaacccttatacaaatggctggaaattgaatccagttgtgggtgcagtctacagtcccgaattctatgcaggcacggtcctgttgtgccaggccaaccaggagggatcttccatgtacagtgcccccagttcacttgtatatacttctgcaatgccaggcttcccgtatccagcagccaccgccgcggccgcctaccgaggggcgcacctgcgaggccgcggtcgcaccgtgtacaacaccttcagggccgcggcgcccccgcccccgatcccggcctacggcggagtagtgtatcaagagcctgtgtatggcaataaattgctgcagggtggttatgctgcataccgctacgcccagcctacccctgccactgccgctgcctacagtgacagaaatcagttcgtcttcgttgcagcagatgaaatttcttgtaacacctctgcagttacggacgagtttatgctgccgacccctaccaccacgcacttgctccagcccccacctacggcgttggtgccatgaatgcttttgcacctttgactgatgccaagactaggagccatgctgatgatgtgggtctcgttctttcttcattgcaggctagtatataccgagggggatacaaccgttttgctccatactaaatgacaaaaccataaaaaccttccaatgtggggagaaaggaagctttccgaggcctgagtattgcaatacatgcagtagtacatcattttagcaactctaaaaaaaaaaaaaatacaaataaaaaggaaaaaaaattacattttttatcttatacctcagatattttgttctgtgtattttaatattgtgggtctttaatttctgaaggttccgtagtttggttgctggctgtaggagtttttgtggttgatctagacagatgctagataatgaataaaaactggtttagggccatatccagagtgctatattatgtaaatgaattatatatgctgaatattaagctactggggttatcagctatttgggaagagtgtaagtgactacagtagtcatttttttctgcacctgcattattttattttgcgaaaggggaggttgggaggggcttaggggattggaactggggtttggctgaaagaaaaaaaaaaaaatgtaactgatgaatctaaacgacccactgcaccaacaatcatttatcaatggttctaagttactcattgccagttcaagccaaaggtcatgttgttaagggggtgcttctagtagcacttgtgcatctgagttgaatgaagctgtgcaaacccaccctttaaaccattccacccggcagtattcagcttcttaaccagtcgctatttaggaaaaaaaacccactagttaggccatcaacaagcattctttttatatttcttccagtataataaattattgatatcactgctgacttttatattatgggagggaaaaaataacattaataaaaaggtgataaaaaagcactgtttctatttttttctttttttccaaaaaaagaaagtaataaaaacttaaattctttgtaccagttaaaaaaaatgtataaaatttacatctgtgcagtggagttgttaagttctagaaacagtctatgaagctttagttttagcctagtagaacaactgttagagacagacgtataatttttatggaattacatgataatcatattcggatttatagaagcattttacaagtattgcaatcattgagtagagataatcatggtattttcatcagcttggtactttttgaaacgtgactgcgttgtgtgaacaatctgcaatttttcagtccgtgagatcctgcccttccacctctttcccatacccccaaggattatctcaaaatgatctctttagttctgtctccaaggcccaggacacttgtcagaaggatgcaaaaaaagaaaaaagtacatccaccctcttaatcccaaaagaacaaagtctccccacctttctcggatgcagggccagagtgacacagccgaaaaattgcagtttgtctgtacttctgtttgaactttccacgttgtcctgtttacaagttaacttaagttggggtatccgtcacgggtcttcctgttttgtatttaaataaaaacaacagcagcaggctgtccctgagtagttttgctgccataggttaagtcctcatgtgtacagtgcaggccctgtggcccgcacttcagtaagttatcaactctcaccgctgtgaacctgccaatccgctgtaacaactctgctttaaaacaaaaccaaacaaaactttaaaaaaaaatgtgtgatccagctttctcttgccatcctatgtgcatgccgtaagatcagttggatattaaaccatcaataaagtttcacaagatttgaaaacaaa

SEQ ID NO: 4554 - DNA, 2196 bp, Homo sapiens
  source 1..2196: mol_type = genomic DNA
tccggctctcctttgtttattttctaatctatatttttactggaagatttcctctttattctctcccgccctcctacaagcgctcttgctggccgtctgggtgcacacaccgctccctcgatcaccccagcccccttcctggtctcccgagcgcggggtttgaaggtcacctcctttccagtccccgtgcgagccgcgctgccgccgcctcctccagccagagtcggtgggactggctgcgctgccctgaagtggttctccaagcagcgcggagggtggcggacggcggacggagcccaggggccgcgtcgggtggggaaacccgaactcgcggaggggaatccctccccctccgccccagccccccagcagcacccgcggtggggcgggggcgctctgccagccccgggaacagcagaggcggcggcactggctggacccacgcgcgcgcctccggggctgaagaaggaaggagtgagccgagccgagcaccccacatctggaggggacagccagccgtgggccccgccccggcgtccggagcaggagaactccgagcttcttgcccaggcagagagagcaggagcggaccgcgcgcccgggattgagagtccttgcgctccagacccccacccagtggccgccagggtccccgcctgtccggaccctcgccgcgcccaggcaggcgcgccagggcggggctgacctgcccgcgaagttgcggacagtgcgtgagaaaccagcacccccttccgccgcctccagcttatggtgagtgtggctgggggtgcagagagcgcacgggaattcgggggtctggggccgagaacgtgaccgcagccgggctcgccgggagttctaggaaactggtcaaagaactcatgcaagtggaacttacagcttccttgatcggactcagcattcagatatcaaagcagactgcaatacctgcgtggaaatagaagacagaaaggtttcaagacaacagatgaattgtgaaagagagcagctaaggggtaatcaggaagcagccgctgcccctgacacaatggctcagccttacgcttcggcccagtttgctcccccgcagaacggtatccccgcggaatacacggcccctcatccccaccccgcgccagagtacacaggccagaccacggttcccgagcacacattaaacctgtaccctcccgcccagacgcactccgagcagagcccggcggacacgagcgctcagaccgtctctggcaccgccacacagacagatgacgcagcaccgacggatggccagccccagacacaaccttctgaaaacacggaaaacaagtctcagcccaagcggctgcatgtctccaatatccccttcaggttccgggatccggacctcagacaaatgtttggtcaatttggtaaaatcttagatgttgaaattatttttaatgagcgaggctcaaagggatttggtttcgtaactttcgaaaatagtgccgatgcggacagggcgagggagaaattacacggcaccgtggtagagggccgtaaaatcgaggtaaataatgccacagcacgtgtaatgacaaataaaaagaccgtcaacccttatacaaatggctggaaattgaatccagttgtgggtgcagtctacagtcccgaattctatgcagtgccaggcttcccgtatccagcagccaccgccgcggccgcctaccgaggggcgcacctgcgaggccgcggtcgcaccgtgtacaacaccttcagggccgcggcgcccccgcccccgatcccggcctacggcggtgttgtttaccaggatggattttatggtgcagacatttatggtggttatgctgcataccgctacgcccagcctacccctgccactgccgctgcctacagtgacagttacggacgagtttatgctgccgacccctaccaccacgcacttgctccagcccccacctacggcgttggtgccatgaatgcttttgcacctttgactgatgccaagactaggagccatgctgatgatgtgggtctcgttctttcttcattgcaggctagtatataccgagggggatacaaccgttttgctccatactaaatgacaaaaccataaaaaccttccaatgtggggagaaaggaagctttccgaggcctgagtattgcaatacatgcagtagtacatcattttagcaa

SEQ ID NO: 4555 - DNA, 1530 bp, Homo sapiens
  source 1..1530: mol_type = genomic DNA
accttccattttggtagcttcaactttgcagctgctgtgtctcttcgtcgtctgggaagaaaactttcacattaagagttgctgatgcggattttctttctttcctctcccggcgttgatgagtgcttggctcctgacagaagggatttggctcccagctttgtagttcggaagaagttgggtctatagatttccccctaactctccattgatgtgttgagcttcagagggaataataactctacgtaaagcatgctggcgtctcaaggagttctcctgcatccttatggcgtgcctatgattgtaccggcagctccttaccttcctggactgattcagggtaatcaggaagcagccgctgcccctgacacaatggctcagccttacgcttcggcccagtttgctcccccgcagaacggtatccccgcggaatacacggcccctcatccccaccccgcgccagagtacacaggccagaccacggttcccgagcacacattaaacctgtaccctcccgcccagacgcactccgagcagagcccggcggacacgagcgctcagaccgtctctggcaccgccacacagacagatgacgcagcaccgacggatggccagccccagacacaaccttctgaaaacacggaaaacaagtctcagcccaagcggctgcatgtctccaatatccccttcaggttccgggatccggacctcagacaaatgtttggtcaatttggtaaaatcttagatgttgaaattatttttaatgagcgaggctcaaagggatttggtttcgtaactttcgaaaatagtgccgatgcggacagggcgagggagaaattacacggcaccgtggtagagggccgtaaaatcgaggtaaataatgccacagcacgtgtaatgacaaataaaaagaccgtcaacccttatacaaatggctggaaattgaatccagttgtgggtgcagtctacagtcccgaattctatgcaggcacggtcctgttgtgccaggccaaccaggagggatcttccatgtacagtgcccccagttcacttgtatatacttctgcaatgccaggcttcccgtatccagcagccaccgccgcggccgcctaccgaggggcgcacctgcgaggccgcggtcgcaccgtgtacaacaccttcagggccgcggcgcccccgcccccgatcccggcctacggcggagtagtgtatcaagagcctgtgtatggcaataaattgctgcagggtggttatgctgcataccgctacgcccagcctacccctgccactgccgctgcctacagtgacagttacggacgagtttatgctgccgacccctaccaccacgcacttgctccagcccccacctacggcgttggtgccatggctagtatataccgagggggatacaaccgttttgctccatactaaatgacaaaaccataaaaaccttccaatgtggggagaaaggaagctttccgaggcctgagtattgcaatacatgcagtagtacatcattttagcaactct

SEQ ID NO: 4556 - DNA, 4021 bp, Homo sapiens
  source 1..4021: mol_type = genomic DNA
accttccattttggtagcttcaactttgcagctgctgtgtctcttcgtcgtctgggaagaaaactttcacattaagagttgctgatgcggattttctttctttcctctcccggcgttgatgagtgcttggctcctgacagaagggatttggctcccagctttgtagttcggaagaagttgggtctatagatttccccctaactctccattgatgtgttgagcttcagagggaataataactctacgtaaagcatgctggcgtctcaaggagttctcctgcatccttatggcgtgcctatgattgtaccggcagctccttaccttcctggactgattcagggtaatcaggaagcagccgctgcccctgacacaatggctcagccttacgcttcggcccagtttgctcccccgcagaacggtatccccgcggaatacacggcccctcatccccaccccgcgccagagtacacaggccagaccacggttcccgagcacacattaaacctgtaccctcccgcccagacgcactccgagcagagcccggcggacacgagcgctcagaccgtctctggcaccgccacacagacagatgacgcagcaccgacggatggccagccccagacacaaccttctgaaaacacggaaaacaagtctcagcccaagcggctgcatgtctccaatatccccttcaggttccgggatccggacctcagacaaatgtttggtcaatttggtaaaatcttagatgttgaaattatttttaatgagcgaggctcaaagggatttggtttcgtaactttcgaaaatagtgccgatgcggacagggcgagggagaaattacacggcaccgtggtagagggccgtaaaatcgaggtaaataatgccacagcacgtgtaatgacaaataaaaagaccgtcaacccttatacaaatggctggaaattgaatccagttgtgggtgcagtctacagtcccgaattctatgcagtgccaggcttcccgtatccagcagccaccgccgcggccgcctaccgaggggcgcacctgcgaggccgcggtcgcaccgtgtacaacaccttcagggccgcggcgcccccgcccccgatcccggcctacggcggagtagtgtatcaagagcctgtgtatggcaataaattgctgcagggtggttatgctgcataccgctacgcccagcctacccctgccactgccgctgcctacagtgacagttacggacgagtttatgctgccgacccctaccaccacgcacttgctccagcccccacctacggcgttggtgccatgaatgcttttgcacctttgactgatgccaagactaggagccatgctgatgatgtgggtctcgttctttcttcattgcaggctagtatataccgagggggatacaaccgttttgctccatactaaatgacaaaaccataaaaaccttccaatgtggggagaaaggaagctttccgaggcctgagtattgcaatacatgcagtagtacatcattttagcaactctaaaaaaaaaaaaaatacaaataaaaaggaaaaaaaattacattttttatcttatacctcagatattttgttctgtgtattttaatattgtgggtctttaatttctgaaggttccgtagtttggttgctggctgtaggagtttttgtggttgatctagacagatgctagataatgaataaaaactggtttagggccatatccagagtgctatattatgtaaatgaattatatatgctgaatattaagctactggggttatcagctatttgggaagagtgtaagtgactacagtagtcatttttttctgcacctgcattattttattttgcgaaaggggaggttgggaggggcttaggggattggaactggggtttggctgaaagaaaaaaaaaaaaatgtaactgatgaatctaaacgacccactgcaccaacaatcatttatcaatggttctaagttactcattgccagttcaagccaaaggtcatgttgttaagggggtgcttctagtagcacttgtgcatctgagttgaatgaagctgtgcaaacccaccctttaaaccattccacccggcagtattcagcttcttaaccagtcgctatttaggaaaaaaaacccactagttaggccatcaacaagcattctttttatatttcttccagtataataaattattgatatcactgctgacttttatattatgggagggaaaaaataacattaataaaaaggtgataaaaaagcactgtttctatttttttctttttttccaaaaaaagaaagtaataaaaacttaaattctttgtaccagttaaaaaaaatgtataaaatttacatctgtgcagtggagttgttaagttctagaaacagtctatgaagctttagttttagcctagtagaacaactgttagagacagacgtataatttttatggaattacatgataatcatattcggatttatagaagcattttacaagtattgcaatcattgagtagagataatcatggtattttcatcagcttggtactttttgaaacgtgactgcgttgtgtgaacaatctgcaatttttcagtccgtgagatcctgcccttccacctctttcccatacccccaaggattatctcaaaatgatctctttagttctgtctccaaggcccaggacacttgtcagaaggatgcaaaaaaagaaaaaagtacatccaccctcttaatcccaaaagaacaaagtctccccacctttctcggatgcagggccagagtgacacagccgaaaaattgcagtttgtctgtacttctgtttgaactttccacgttgtcctgtttacaagttaacttaagttggggtatccgtcacgggtcttcctgttttgtatttaaataaaaacaacagcagcaggctgtccctgagtagttttgctgccataggttaagtcctcatgtgtacagtgcaggccctgtggcccgcacttcagtaagttatcaactctcaccgctgtgaacctgccaatccgctgtaacaactctgctttaaaacaaaaccaaacaaaactttaaaaaaaaatgtgtgatccagctttctcttgccatcctatgtgcatgccgtaagatcagttggatattaaaccatcaataaagtttcacaagatttgaaaacaaagtttctgtagcttcgatacctaagacagacgatagtgatcttgaaaagagaaaagggggaggggggagctacttatcagccaaaagcatataaagtgttcttttcaccagacttctttgggtgggtgaggggaggggcaagagggtgttttatagcatcactaagacattctcattcccccacctggaaaacagtgttatggcaatgggtgcctggttgatgttcttaaaggaaacgaattattaaaacactatgacatcctccagagggaagaaagagtaggagcagggggctatggagaataaatttctcccaattgccgcctcagatttcaaaatccagaatttgtattgtgtttcgaatcacaaacatagaattcttactgtgttggttaaagtaaaattcatttgcagttttgattttcatcaatgagctgtactttcccccatgactgtatgtagttttaataaaatcatttagagtgagtgagtgccaaccgatgttgcagaatcttttgtctaggcactccaagatgccaataagtcattttaaaatgtatgtcagagatgtaaacaaacattttggattttttttaaacagtatttatttggaatgttttcatttatctaaataactattgctattatgaattatggaaaattaatattatgtgtggcatatagtgacttcttaacacacacatcacgcaatctgcaaacccagaaaatgtgtatatctgtctttagaaattagtgtttatatcacttacagtggtttgtgaataaagaaaactggtttgtaatatcaaaaaaataaaagcttagtctgaaaagg

SEQ ID NO: 4557 - DNA, 4099 bp, Homo sapiens
  source 1..4099: mol_type = genomic DNA
accttccattttggtagcttcaactttgcagctgctgtgtctcttcgtcgtctgggaagaaaactttcacattaagagttgctgatgcggattttctttctttcctctcccggcgttgatgagtgcttggctcctgacagaagggatttggctcccagctttgtagttcggaagaagttgggtctatagatttccccctaactctccattgatgtgttgagcttcagagggaataataactctacgtaaagcatgctggcgtctcaaggagttctcctgcatccttatggcgtgcctatgattgtaccggcagctccttaccttcctggactgattcagggtaatcaggaagcagccgctgcccctgacacaatggctcagccttacgcttcggcccagtttgctcccccgcagaacggtatccccgcggaatacacggcccctcatccccaccccgcgccagagtacacaggccagaccacggttcccgagcacacattaaacctgtaccctcccgcccagacgcactccgagcagagcccggcggacacgagcgctcagaccgtctctggcaccgccacacagacagatgacgcagcaccgacggatggccagccccagacacaaccttctgaaaacacggaaaacaagtctcagcccaagcggctgcatgtctccaatatccccttcaggttccgggatccggacctcagacaaatgtttggtcaatttggtaaaatcttagatgttgaaattatttttaatgagcgaggctcaaagggatttggtttcgtaactttcgaaaatagtgccgatgcggacagggcgagggagaaattacacggcaccgtggtagagggccgtaaaatcgaggtaaataatgccacagcacgtgtaatgacaaataaaaagaccgtcaacccttatacaaatggctggaaattgaatccagttgtgggtgcagtctacagtcccgaattctatgcaggcacggtcctgttgtgccaggccaaccaggagggatcttccatgtacagtgcccccagttcacttgtatatacttctgcaatgccaggcttcccgtatccagcagccaccgccgcggccgcctaccgaggggcgcacctgcgaggccgcggtcgcaccgtgtacaacaccttcagggccgcggcgcccccgcccccgatcccggcctacggcggtgttgtttaccaggatggattttatggtgcagacatttatggtggttatgctgcataccgctacgcccagcctacccctgccactgccgctgcctacagtgacagttacggacgagtttatgctgccgacccctaccaccacgcacttgctccagcccccacctacggcgttggtgccatgaatgcttttgcacctttgactgatgccaagactaggagccatgctgatgatgtgggtctcgttctttcttcattgcaggctagtatataccgagggggatacaaccgttttgctccatactaaatgacaaaaccataaaaaccttccaatgtggggagaaaggaagctttccgaggcctgagtattgcaatacatgcagtagtacatcattttagcaactctaaaaaaaaaaaaaatacaaataaaaaggaaaaaaaattacattttttatcttatacctcagatattttgttctgtgtattttaatattgtgggtctttaatttctgaaggttccgtagtttggttgctggctgtaggagtttttgtggttgatctagacagatgctagataatgaataaaaactggtttagggccatatccagagtgctatattatgtaaatgaattatatatgctgaatattaagctactggggttatcagctatttgggaagagtgtaagtgactacagtagtcatttttttctgcacctgcattattttattttgcgaaaggggaggttgggaggggcttaggggattggaactggggtttggctgaaagaaaaaaaaaaaaatgtaactgatgaatctaaacgacccactgcaccaacaatcatttatcaatggttctaagttactcattgccagttcaagccaaaggtcatgttgttaagggggtgcttctagtagcacttgtgcatctgagttgaatgaagctgtgcaaacccaccctttaaaccattccacccggcagtattcagcttcttaaccagtcgctatttaggaaaaaaaacccactagttaggccatcaacaagcattctttttatatttcttccagtataataaattattgatatcactgctgacttttatattatgggagggaaaaaataacattaataaaaaggtgataaaaaagcactgtttctatttttttctttttttccaaaaaaagaaagtaataaaaacttaaattctttgtaccagttaaaaaaaatgtataaaatttacatctgtgcagtggagttgttaagttctagaaacagtctatgaagctttagttttagcctagtagaacaactgttagagacagacgtataatttttatggaattacatgataatcatattcggatttatagaagcattttacaagtattgcaatcattgagtagagataatcatggtattttcatcagcttggtactttttgaaacgtgactgcgttgtgtgaacaatctgcaatttttcagtccgtgagatcctgcccttccacctctttcccatacccccaaggattatctcaaaatgatctctttagttctgtctccaaggcccaggacacttgtcagaaggatgcaaaaaaagaaaaaagtacatccaccctcttaatcccaaaagaacaaagtctccccacctttctcggatgcagggccagagtgacacagccgaaaaattgcagtttgtctgtacttctgtttgaactttccacgttgtcctgtttacaagttaacttaagttggggtatccgtcacgggtcttcctgttttgtatttaaataaaaacaacagcagcaggctgtccctgagtagttttgctgccataggttaagtcctcatgtgtacagtgcaggccctgtggcccgcacttcagtaagttatcaactctcaccgctgtgaacctgccaatccgctgtaacaactctgctttaaaacaaaaccaaacaaaactttaaaaaaaaatgtgtgatccagctttctcttgccatcctatgtgcatgccgtaagatcagttggatattaaaccatcaataaagtttcacaagatttgaaaacaaagtttctgtagcttcgatacctaagacagacgatagtgatcttgaaaagagaaaagggggaggggggagctacttatcagccaaaagcatataaagtgttcttttcaccagacttctttgggtgggtgaggggaggggcaagagggtgttttatagcatcactaagacattctcattcccccacctggaaaacagtgttatggcaatgggtgcctggttgatgttcttaaaggaaacgaattattaaaacactatgacatcctccagagggaagaaagagtaggagcagggggctatggagaataaatttctcccaattgccgcctcagatttcaaaatccagaatttgtattgtgtttcgaatcacaaacatagaattcttactgtgttggttaaagtaaaattcatttgcagttttgattttcatcaatgagctgtactttcccccatgactgtatgtagttttaataaaatcatttagagtgagtgagtgccaaccgatgttgcagaatcttttgtctaggcactccaagatgccaataagtcattttaaaatgtatgtcagagatgtaaacaaacattttggattttttttaaacagtatttatttggaatgttttcatttatctaaataactattgctattatgaattatggaaaattaatattatgtgtggcatatagtgacttcttaacacacacatcacgcaatctgcaaacccagaaaatgtgtatatctgtctttagaaattagtgtttatatcacttacagtggtttgtgaataaagaaaactggtttgtaatatcaaaaaaataaaagcttagtctgaaaagg

SEQ ID NO: 4558 - DNA, 1513 bp, Homo sapiens
  source 1..1513: mol_type = genomic DNA
gtgcatttgtgttgtgggggcatggggtgcatttgtgtgtatatatgtgtggatgtagggtgcgtttgtctgtgtgtatttgtgtgggcatggagtgcatttgcgttgcgggggtgtggagtgtgtttgtgtgtgtgcacacgcacatggttctcatggtcctcccgttttcaactgaacctgtaattagctcctcagagaccaggtttcaagacaacagatgaattgtgaaagagagcagctaaggggtaatcaggaagcagccgctgcccctgacacaatggctcagccttacgcttcggcccagtttgctcccccgcagaacggtatccccgcggaatacacggcccctcatccccaccccgcgccagagtacacaggccagaccacggttcccgagcacacattaaacctgtaccctcccgcccagacgcactccgagcagagcccggcggacacgagcgctcagaccgtctctggcaccgccacacagacagatgacgcagcaccgacggatggccagccccagacacaaccttctgaaaacacggaaaacaagtctcagcccaagcggctgcatgtctccaatatccccttcaggttccgggatccggacctcagacaaatgtttggtcaatttggtaaaatcttagatgttgaaattatttttaatgagcgaggctcaaagggatttggtttcgtaactttcgaaaatagtgccgatgcggacagggcgagggagaaattacacggcaccgtggtagagggccgtaaaatcgaggtaaataatgccacagcacgtgtaatgacaaataaaaagaccgtcaacccttatacaaatggctggaaattgaatccagttgtgggtgcagtctacagtcccgaattctatgcaggcacggtcctgttgtgccaggccaaccaggagggatcttccatgtacagtgcccccagttcacttgtatatacttctgcaatgccaggcttcccgtatccagcagccaccgccgcggccgcctaccgaggggcgcacctgcgaggccgcggtcgcaccgtgtacaacaccttcagggccgcggcgcccccgcccccgatcccggcctacggcggtgttgtttaccaggatggattttatggtgcagacatttatggtggttatgctgcataccgctacgcccagcctacccctgccactgccgctgcctacagtgacagttacggacgagtttatgctgccgacccctaccaccacgcacttgctccagcccccacctacggcgttggtgccatgaatgcttttgcacctttgactgatgccaagactaggagccatgctgatgatgtgggtctcgttctttcttcattgcaggctagtatataccgagggggatacaaccgttttgctccatactaaatgacaaaaccataaaaaccttccaatgtggggagaaaggaagctttccgaggcctgagtattgcaatacatgcagtagtacatcattttagcaactct

SEQ ID NO: 4559 - DNA, 3524 bp, Homo sapiens
  source 1..3524: mol_type = genomic DNA
aagaaggaaggagtgagccgagccgagcaccccacatctggaggggacagccagccgtgggccccgccccggcgtccggagcaggagaactccgagcttcttgcccaggcagagagagcaggagcggaccgcgcgcccgggattgagagtccttgcgctccagacccccacccagtggccgccagggtccccgcctgtccggaccctcgccgcgcccaggcaggcgcgccagggcggggctgacctgcccgcgaagttgcggacagtgcgtgagaaaccagcacccccttccgccgcctccagcttatggaaactggtcaaagaactcatgcaagtggaacttacagcttccttgatcggactcagcattcagatatcaaagcagactgcaatacctgcgtggaaatagaagacagaaaggtttcaagacaacagatgaattgtgaaagagagcagctaaggggtaatcaggaagcagccgctgcccctgacacaatggctcagccttacgcttcggcccagtttgctcccccgcagaacggtatccccgcggaatacacggcccctcatccccaccccgcgccagagtacacaggccagaccacggttcccgagcacacattaaacctgtaccctcccgcccagacgcactccgagcagagcccggcggacacgagcgctcagaccgtctctggcaccgccacacagacagatgacgcagcaccgacggatggccagccccagacacaaccttctgaaaacacggaaaacaagtctcagcccaagcggctgcatgtctccaatatccccttcaggttccgggatccggacctcagacaaatgtttggtcaatttggtaaaatcttagatgttgaaattatttttaatgagcgaggctcaaagggatttggtttcgtaactttcgaaaatagtgccgatgcggacagggcgagggagaaattacacggcaccgtggtagagggccgtaaaatcgaggtaaataatgccacagcacgtgtaatgacaaataaaaagaccgtcaacccttatacaaatggctggaaattgaatccagttgtgggtgcagtctacagtcccgaattctatgcaggcacggtcctgttgtgccaggccaaccaggagggatcttccatgtacagtgcccccagttcacttgtatatacttctgcaatgccaggcttcccgtatccagcagccaccgccgcggccgcctaccgaggggcgcacctgcgaggccgcggtcgcaccgtgtacaacaccttcagggccgcggcgcccccgcccccgatcccggcctacggcggtgttgtttaccaggatggattttatggtgcagacatttatggtggttatgctgcataccgctacgcccagcctacccctgccactgccgctgcctacagtgacagaaatcagttcgtcttcgttgcagcagatgaaatttcttgtaacacctctgcagttacggacgagtttatgctgccgacccctaccaccacgcacttgctccagcccccacctacggcgttggtgccatgccccaaggttccagccccagcacagacttcagaggagctaagctgcacacttccaggcctctgctgtcaggcagctgagaatctgactgcctctcctcccctattacaattcatgtttaaagtcatagtcgcccaggaaagaaaatagagaggggcacactttgtgtgtgtacctagtacataagaaagtagaaggaatcagctgggtttgggggttgccttttgttttggggcaggtctgggtttttgttttgggagggggtggggggagggtaaaaaatgggaggtaagggtggggtgaacttgcctgtacttgttcaaacttctatgcactgaaactcttgagtacagtaagacgtgcccatcacgtgagagcatatgcaatcattacaaagctttggcatgcagttttctgcttggatcaagaatatcagtccttaccctaaaaatgaatccccataggcattcatttgaattgccaatacttttagaaaaaggaaatcgttaagtgccaccttgtagccattaaaaccatggccggacagttcactgaagctcagtcatagaaattcagccatgatttggaagcattgttttgcacaagcttaattacatcaagcaattcatctgtacaactccacaactcccttctcaagatcagattccatacagcttacagagccaagttaagtaagaagtaggttgagattttcatcccaattctgcattcaacaactctgcttcaacacctagtccacatgaggaatgtgttggagagttgaattacattcaacaactggtccaaattcaacctcaagtgcagattattctgttataaaaaaatgagacagtgaaaatccttccattgtccagcttataatagagtccttttagctaagaggactggctgacagaatttggttttgcagggaatttctttaggaggagctattggggaaggtcaggaatggccctatctttagttctccaagaatgacctgggatgggtagggggtgcctccatttcggttggttttgagtgtctatttttcacattagtctttttgatgatccacatgttgcaaaaggaaaatgtaaaaaacacacccctcaaattgctttgtttcagaatgcttttgcacctttgactgatgccaagactaggagccatgctgatgatgtgggtctcgttctttcttcattgcaggctagtatataccgagggggatacaaccgttttgctccatactaaatgacaaaaccataaaaaccttccaatgtggggagaaaggaagctttccgaggcctgagtattgcaatacatgcagtagtacatcattttagcaactctaaaaaaaaaaaaaatacaaataaaaaggaaaaaaaattacattttttatcttatacctcagatattttgttctgtgtattttaatattgtgggtctttaatttctgaaggttccgtagtttggttgctggctgtaggagtttttgtggttgatctagacagatgctagataatgaataaaaactggtttagggccatatccagagtgctatattatgtaaatgaattatatatgctgaatattaagctactggggttatcagctatttgggaagagtgtaagtgactacagtagtcatttttttctgcacctgcattattttattttgcgaaaggggaggttgggaggggcttaggggattggaactggggtttggctgaaagaaaaaaaaaaaaatgtaactgatgaatctaaacgacccactgcaccaacaatcatttatcaatggttctaagttactcattgccagttcaagccaaaggtcatgttgttaagggggtgcttctagtagcacttgtgcatctgagttgaatgaagctgtgcaaacccaccctttaaaccattccacccggcagtattcagcttcttaaccagtcgctatttaggaaaaaaaa

SEQ ID NO: 4560 - DNA, 974 bp, Homo sapiens
  source 1..974: mol_type = genomic DNA
gcggcgtgtgcgcctccggggctgctgattagaataggggacttggccgtggatggaatccgggaaacccaaaccggagatggaaggatgaggctgcgtttgcagcgcgtgaatgggacgcggatatcaaagcagactgcaatacctgcgtggaaatagaagacagaaaggtttcaagacaacagatgaattgtgaaagagagcagctaaggggtaatcaggaagcagccgctgcccctgacacaatggctcagccttacgcttcggcccagtttgctcccccgcagaacggtatccccgcggaatacacggcccctcatccccaccccgcgccagagtacacaggccagaccacggttcccgagcacacattaaacctgtaccctcccgcccagacgcactccgagcagagcccggcggacacgagcgctcagaccgtctctggcaccgccacacagacagatgacgcagcaccgacggatggccagccccagacacaaccttctgaaaacacggaaaacaagtctcagcccaagcggctgcatgtctccaatatccccttcaggttccgggatccggacctcagacaaatgtttggtcaatttggtaaaatcttagatgttgaaattatttttaatgagcgaggctcaaagggatttggtttcgtaactttcgaaaatagtgccgatgcggacagggcgagggagaaattacacggcaccgtggtagagggccgtaaaatcgaggtaaataatgccacagcacgtgtaatgacaaataaaaagaccgtcaacccttatacaaatggctggaaattgaatccagttgtgggtgcagtctacagtcccgaattctatgcaggcacggtcctgttgtgccaggccaaccaggagggatcttccatgtacagtgcccccagttcacttgtatatacttctgcaatgccaggcttcccgtatccagcagccaccgcc

SEQ ID NO: 4561 - DNA, 1354 bp, Homo sapiens
  source 1..1354: mol_type = genomic DNA
ggtaaccaggagccgacaacaactcctgacgcaatggttcagccttttactaccatcccatttccaccacctccgcagaatggaattcccacagagtatggggtgccacacactcaagactatgccggccagaccggtgagcataacctgacactctacggaagtacgcaagcccacggggagcagagcagcaactcacccagcacacaaaatggatctcttacgcagacagaaggtggagcacagacagacggccagcagtcacagacacaaagtagtgaaaattcagagagtaaatctaccccgaaacggctgcatgtctctaatattcctttccgcttccgggaccctgacctccggcagatgtttgggcagtttggcaaaatcctagatgtagaaataatctttaatgaacgtggctctaagggattcgggttcgtaactttcgagaatagtgctgatgcagacagggccagggagaaattacacggcaccgtggtagagggccgtaaaatcgaggtgaataatgctacagcacgtgtaatgaccaataagaagatggtcacaccatatgcaaatggttggaaattaagcccagtagttggagctgtatatggtccggagttatatgcagcatccagctttcaagcagatgtgtccctaggcaatgatgcagcagtgcccctatcaggaagagggggtatcaacacttacattcctttaatcattcctggcttcccttaccctactgcagccaccacggcagccgctttcagaggagcccatttgaggggcagagggcggacagtatatggtgcagtccgagcggtacctccaacagccatccccgcctatccaggtgtggtttaccaggacggattttacggtgctgacctctatggtggatatgcagcctacagatatgcacagcctgctactgcaaccgcagccaccgctgctgcagccgctgcagccgcttacagtgacggttatggcagggtgtacacagccgacccctaccatgcccttgcccctgccgctagctatggagttggcgctgtggcgagtttataccgaggtggctacagccgatttgccccctactgaagtgacgtgagacccctgcaaatgggacagccccccagttcatgaggcctggctattgcaatatttactagtagaggaactctatagcaagatgaagaggaaaaacaaacaaacaaacaaaaaaaaacacaaaaaaagaaagaatacttttttatacctcactatgttctttgaatatgtatttttcctttaaatttctgcctttaattcttttgttccaaagattgtgcatttttttctttttttt

SEQ ID NO: 4562 - DNA, 759 bp, Homo sapiens
  source 1..759: mol_type = genomic DNA
gagagactgccagagaggaagagaaaagaaaggaagaaacattagaaagaaaaaggaaggaaaacggtataaagagagatcaattacccacccttaaatagctagattggggggggaggggggtggaaaagaaagctgtggaggtgtgccccagcacggctgctttgaaaggtttatcatctatccgtttggtttatggagaaaaagaaaatggtaactcagctggaaggctgaagtctttcacctgagctgctgccagttcgctcttctgttcctgggtggttgggagaagagaagagggagggtattttatgctttaattaaagacagataagagagcagggtaaccaggagccgacaacaactcctgacgcaatggttcagccttttactaccatcccatttccaccacctccgcagaatggaattcccacagagtatggggtgccacacactcaagactatgccggccagaccggtgagcataacctgacactctacggaagtacgcaagcccacggggagcagagcagcaactcacccagcacacaaaatggatctcttacgacagaaggtggagcacagacagacggccagcagtcacagacacaaagtagtgaaaattcagagagtaaatctaccccgaaacggctgcatgtctctaatattcctttccgcttccgggaccctgacctccggcagatgtttgggtttggcaaaatcctagatgtagaaataatctttaatgaacgtggctct

SEQ ID NO: 4563 - DNA, 6661 bp, Homo sapiens
  source 1..6661: mol_type = genomic DNA
atgaagaacgagcctctgactccaggttatcatggattcccagcgcgggacagccagggtaaccaggagccgacaacaactcctgacgcaatggttcagccttttactaccatcccatttccaccacctccgcagaatggaattcccacagagtatggggtgccacacactcaagactatgccggccagaccggtgagcataacctgacactctacggaagtacgcaagcccacggggagcagagcagcaactcacccagcacacaaaatggatctcttacgacagaaggtggagcacagacagacggccagcagtcacagacacaaagtagtgaaaattcagagagtaaatctaccccgaaacggctgcatgtctctaatattcctttccgcttccgggaccctgacctccggcagatgtttgggcagtttggcaaaatcctagatgtagaaataatctttaatgaacgtggctctaagggattcgggttcgtaactttcgagaatagtgctgatgcagacagggccagggagaaattacacggcaccgtggtagagggccgtaaaatcgaggtgaataatgctacagcacgtgtaatgaccaataagaagatggtcacaccatatgcaaatggttggaaattaagcccagtagttggagctgtatatggtccggagttatatgcagcatccagctttcaagcagatgtgtccctaggcaatgatgcagcagtgcccctatcaggaagagggggtatcaacacttacattcctttaatcattcctggcttcccttaccctactgcagccaccacggcagccgctttcagaggagcccatttgaggggcagagggcggacagtatatggtgcagtccgagcggtacctccaacagccatccccgcctatccaggtgtggtttaccaggacggattttacggtgctgacctctatatagaatctgcaaactgcttcagatcaaacagggtggatatgcagcctacagatatgcacagcctgctactgcaaccgcagccaccgctgctgcagccgctgcagccgcttacagtgacggttatggcagggtgtacacagccgacccctaccatgcccttgcccctgccgctagctatggagttggcgctgtggcgagtttataccgaggtggctacagccgatttgccccctactgaagtgacgtgagacccctgcaaatgggacagccccccagttcatgaggcctggctattgcaatatttactagtagaggaactctatagcaagatgaagaggaaaaacaaacaaacaaacaaaaaaaaacacaaaaaaagaaagaatacttttttatacctcactatgttctttgaatatgtatttttcctttaaatttctgcctttaattcttttgttccaaagattgtgcatttttttctttttttttttaaactgtggtaaaaaaaaaaaaaataatgcatttccatgtctgtatgtccgtgcttagcttattctatcaatcacggaagaggcagtcaaggaggaaggagagacattaggagccgataaatgcatctgatcagaaatcagcagacagaattaccaaagtgtatctggtgctgaatgactgggggacaagcagaagtggaagagatctttctgcaacaggatattcttctagtcttctgagtttctggtctttgacaggcaattctggttggctgtggctggaatccacatgctgatagataggaatttgtgcttacaaagcaggagaattaaaaagacgctttcctctcctcttccctcctgtcttctccgttctttttacaatcatcttacacgcacagcctgagacagctggcatagtttttggaattatagtattgatatttccaaacgtgctctcagacagtggataataaacacctcattaggaaaccgatctcagaatgaactctggagtatgaaaaagatcatttctttttgttcctgtaacctagcattccttctaggcttcttctcctttaattgaaccacagcttagctcatgtattcttttattaacaccctgctctcatgtccataagattcaggaatttaggacccagggacagaaaagtgaataagccagtgaccagatttcccccagatgtcttgaggattagaagtacaaattgttgacagccattaaagagggtgaggaagggaaaaggaatattagaagatctggtatttcttacttttttcttgcctcagaaagtacaaagtttaaaaaatagaataaagaatctgctggggaaagatagagtaccaggtcctaggtcagtagtccctggaagttttggtgatgaggacatggaagggcaggcagaggcactttgtacttgctccaaagccataggaattttcatcttccagagcctttatgagtcacttctctatccacagtcttgagcctgtggctatcccgctgagcttctcactgtcctccaaaaacaccccgctgagcacccggaccactttgtacacattaacactacaggacataaaatgcagaggccctgagattgctgccctcccatattggaaggagggtctgcgatggcaagggtcttctatatcaccagaaagagtcgcgcagtgagtcactgccgttgccatctggctgtaattttctatgttatcaaggtaggagggagtgtttctcttctagctgttagatagaactgataaaagcaagtgtcctacagcatttcccaaatgaaggcattaggaaatagaaaagcacggtctttttggctccctggtctagtcacattggtactagggtgacctttcacccaagggacagctgctaaagggagtaattcagagacatggagcttctggttatgggtttgttttgggtttgtttttaactcctgcctccacacatgttcttgactgataactgactcatgtccctgaattaaaatgactgacctatgacagcatcaagcattctttgtaagcagagtgatatatctgagagggcgttgacctgttgtgtagaatacatatcctttcccccttcagaatcctgtctcgcctcgtaactgggagagaggctgtgcctgaaactaggggcgatgtcaaggaagctagaggcctcgatgcaattattactgactctggggaggaagacagagaataaggggacaccaactgcccagtccactggccatttttaagggtccccccaccccaagccaaagtttggtttgttgctgttaagacaatttttgttgtatgtatataaatattttagttagaggagcggggaatgggatgcgggctttcacagttctagggaatgggggcagggaggattttgcttttgcttttgctttgagggagaactttagctgactaaaaaaacagaagtttggggtcatgatcacaaaggggccattcccaaaagatggcaagccacgtattcagtggagactaggccaaattctaaatggttttatccatagcaggggagaataggagaatgagtttaagagtttttctcttcttttttcctagaaagaggtaaggataatgggaaaggtagagaaggcggctcccacagaccttttaagagaggcagaatcttgagcttgaggcaccttgagtgcatctcagttcagctggttctggctgaggcctccaaaggcaagctctgtgctttccagtggtttctgctgcatttccagggatggtgtttaacaccgcttcctccagctcccttttctaagaaagaataaatggagttctgctttttatgaaagggtctttggttttcagtgtcaacactgagaattggggctcttgcaagcatctggatttcacagtatcaacctccccgtcaccttttgaactttgagactccgtacggtcaacttcaccagaggcaggttgctcgaagcagcactgcttgtctgttcctgactctggttctcactgtattaaaaaagagagtcagaggagtctggcatttcgtgagtttgttagaggatgctggctgataattccagaaaacttactgatgctaaatcacagtacatgcatgattctttttcagctttactatagttcatgacctggactttctgtactcttggaagctgggctccttaaaggaggcctctagtgaacacctttatctccatgtccctcttagagcccagagagctgcccataggcattttccagaattcctcatgtcacctagttcaatttccattaactcagatcagccattgtgattcaccatttgtcaggctctcaggtttaacaaaacctactatcaccatcatccttcaacagccacagtctgaattgagccaacatttttttttctttgagaaagaagtggactggggcacaacttttagtctgaggggagctagtggaaatctagacaatagaagtcatcgatagcagcttttcctcaaatgtgtgactcctcaggggctaaactgctcttagcttagaattatgctttactagagatctagcagataagtgggttaatcactaccatcctgtaactagttatatagcttccagacatgagggagacatcaaacagggatggaagcaaccccaaggatatgcaagaagggcatgatgaacccccttccctctggcaggagaacaaggccaaccaagggacagactggaaagcacttagatgtttaaggaggagaaaggggaagctttgaccagtccttgccttttgccaagttcagccagttctccgctgcttgcaacctctagcgcagtaacatttgcagaattgcagattttcccccagatactaggaggaaagggactttggggggtggggaaggggtcgtggtgttttaaaagcataagttacctgtttgcactgttttaagataggaaaaaaaaatagtgggcaaggtgaacatcagacgtaaatttgtgtgtttttattttgtcatgctcttgaaaatgtttgaccatttgtagtatacacagtgaaacttgattctctgttgcataaaacactatatttttttggaaatgttactgtccaaaagcctcttccctccctttccttttcctatgtacttccttcatacttgctttactgatcagccaggcaatagccatccaagagctagagcatgaaacagggccctttccaagtaggctctgggtgtcctaagccagcgtgtgccctctggtttagtgagtgtaatagagtccctggcacctttctttgcaaatgaggctaacagaccagactgcagcaagttatcagattcctcaatcagatgcactaggagtgaggagcccagggatggagggggttcctgaagtattgcagttggctgtagtagctgagttcttttccatgttaccgaaactgtagccagttacagtttactcaggaaaacggtagatcaattcagccatggtagtgctggttggcagggattggtaacggagagaactgctcatcagccaaaactcaagccttgccttttaggaggccaccagcagagggacttggtcctccttgtctggtacttgtgtacatgccggtgacctgaggactccactcacactggcgagcaaaaagggagcagtgattctcttttctctccccaccccctgccctttgttaccaacaccagtttcccagggggtacatgagtttctgaatttttaaaaaatgtttttggtttggtttttctggggactgataagtgctttaagcaatgtccataccccgtcaagactcccagcttagtcattttcttgtatttttctgttcacagtatttgtgtgtgtgcttgttttggcagctcattttggctgtattatatattgagtgatgaattgatcctcttttttccctaagggatatgaattgtttttcttgtgttatattctgcttgtgaatagctggagcaaacctggggctgacacgcgtaagctagggctgcaaagcgagaagagagccggtggagtgtacttgtccctgacaggctgacctacctgagtctctgagcttttcagtccaaatctttgcaaggctcaaaatgccacagaacctctcctcttctccccactccccatggcagggaccggaccatccctacatgcaacatgctgttcctccagcccctcccattgccatggcaaaacaggtacctttggggcatgggggcattacatgggatgcttgtgtaatcgaccacctagccttctctctcccctcccgtcctcccccagaatcacttcctaggacacccgagctgcttgcccagggtcctgtttccctgctaactccagagaagcatcccagggctttgtgacagtctctaattcccttcccttctcgttaagaatcatattgtatagtagctttcagaccatacagtattcattgggttactcctattattatcaagtagctggaattgtgaaggtcggagtagttagatctttagcttttattccttatttttttgtattactctccatgtgtataaattattgatcatgttgctggcttttataaactctaagcgaaggaggagcactgcctcagcctttgcacatggtaatgaagcactgtttttaaataaaagagagaaacacc

SEQ ID NO: 4564 - DNA, 663 bp, Homo sapiens
  source 1..663: mol_type = genomic DNA
atggtagctgtgtgcaaggggagagcagcagggtttagaattccaggaaggaagagagagtgatgtcatcagattccatggaccagcccaggaacccctgtgagaacgagcctctgactccaggttatcatggattcccagcgcgggacagccagggtaaccaggagccgacaacaactcctgacgcaatggttcagccttttactaccatcccatttccaccacctccgcagaatggaattcccacagagtatggggtgccacacactcaagactatgccggccagaccggtgagcataacctgacactctacggaagtacgcaagcccacggggagcagagcagcaactcacccagcacacaaaatggatctcttacgcagacagaaggtggagcacagacagacggccagcagtcacagacacaaagtagtgaaaattcagagagtaaatctaccccgaaacggctgcatgtctctaatattcctttccgcttccgggaccctgacctccggcagatgtttgggcagtttggcaaaatcctagatgtagaaataatctttaatgaacgtggctctaagggattcgggttcgtaactttcgagaatagtgctgatgcagacagggccagggagaaattacacggcaccgtggtagagggcc

SEQ ID NO: 4565 - DNA, 1356 bp, Homo sapiens
  source 1..1356: mol_type = genomic DNA
atggcggagggcgcccagccgcatcagccgcctcagctcgggcccggcgccgccgcccggggcatgaagcgggagtcggagctggagctgccggtgcccggagcgggaggagacggagccgatcccggcctgagcaagcggccgcgcactgaggaggcggcggccgacggtggcggcgggatgcagaacgagcctctgactccaggttatcatggattcccagcgcgggacagccagggtaaccaggagccgacaacaactcctgacgcaatggttcagccttttactaccatcccatttccaccacctccgcagaatggaattcccacagagtatggggtgccacacactcaagactatgccggccagaccggtgagcataacctgacactctacggaagtacgcaagcccacggggagcagagcagcaactcacccagcacacaaaatggatctcttacgcagacagaaggtggagcacagacagacggccagcagtcacagacacaaagtagtgaaaattcagagagtaaatctaccccgaaacggctgcatgtctctaatattcctttccgcttccgggaccctgacctccggcagatgtttgggcagtttggcaaaatcctagatgtagaaataatctttaatgaacgtggctctaagggattcgggttcgtaactttcgagaatagtgctgatgcagacagggccagggagaaattacacggcaccgtggtagagggccgtaaaatcgaggtgaataatgctacagcacgtgtaatgaccaataagaagatggtcacaccatatgcaaatggttggaaattaagcccagtagttggagctgtatatggtccggagttatatgcagcatccagctttcaagcagatgtgtccctaggcaatgatgcagcagtgcccctatcaggaagagggggtatcaacacttacattcctttaatcagtctccctttagttcctggcttcccttaccctactgcagccaccacggcagccgctttcagaggagcccatttgaggggcagagggcggacagtatatggtgcagtccgagcggtacctccaacagccatccccgcctatccaggtgtggtttaccaggacggattttacggtgctgacctctatggtggatatgcagcctacagatatgcacagcctgctactgcaaccgcagccaccgctgctgcagccgctgcagccgcttacagtgacggttatggcagggtgtacacagccgacccctaccatgcccttgcccctgccgctagctatggagttggcgctgtggcgagtttataccgaggtggctacagccgatttgccccctactga

SEQ ID NO: 4566 - DNA, 1409 bp, Homo sapiens
  source 1..1409: mol_type = genomic DNA
aacgagcctctgactccaggttatcatggattcccagcgcgggacagccagggtaaccaggagccgacaacaactcctgacgcaatggttcagccttttactaccatcccatttccaccacctccgcagaatggaattcccacagagtatggggtgccacacactcaagactatgccggccagaccggtgagcataacctgacactctacggaagtacgcaagcccacggggagcagagcagcaactcacccagcacacaaaatggatctcttacgacagaaggtggagcacagacagacggccagcagtcacagacacaaagtagtgaaaattcagagagtaaatctaccccgaaacggctgcatgtctctaatattcctttccgcttccgggaccctgacctccggcagatgtttgggcagtttggcaaaatcctagatgtagaaataatctttaatgaacgtggctctaagggattcgggttcgtaactttcgagaatagtgctgatgcagacagggccagggagaaattacacggcaccgtggtagagggccgtaaaatcgaggtgaataatgctacagcacgtgtaatgaccaataagaagatggtcacaccatatgcaaatggttggaaattaagcccagtagttggagctgtatatggtccggagttatatgcagcatccagctttcaagcagatgtgtccctaggcaatgatgcagcagtgcccctatcaggaagagggggtatcaacacttacattcctttaatcattcctggcttcccttaccctactgcagccaccacggcagccgctttcagaggagcccatttgaggggcagagggcggacagtatatggtgcagtccgagcggtacctccaacagccatccccgcctatccaggtgtggtttaccaggacggattttacggtgctgacctctatatagaatctgcaaactgcttcagatcaaacagggtggatatgcagcctacagatatgcacagcctgctactgcaaccgcagccaccgctgctgcagccgctgcagccgcttacagtgacggttatggcagggtgtacacagccgacccctaccatgcccttgcccctgccgctagctatggagttggcgctgtggcgagtttataccgaggtggctacagccgatttgccccctactgaagtgacgtgagacccctgcaaatgggacagccccccagttcatgaggcctggctattgcaatatttactagtagaggaactctatagcaagatgaagaggaaaaacaaacaaacaaacaaaaaaaaacacaaaaaaagaaagaatacttttttatacctcactatgttctttgaatatgtatttttcctttaaatttctgcctttaattcttttgttccaaa

SEQ ID NO: 4567 - DNA, 1538 bp, Homo sapiens
  source 1..1538: mol_type = genomic DNA
ctgccagagaggaagagaaaagaaaggaagaaacattagaaagaaaaaggaaggaaaacggtataaagagagatcaattacccacccttaaatagctagattggggggggaggggggtggaaaagaaagctgtggaggtgtgccccagcacggctgctttgaaaggtttatcatctatccgtttggtttatggagaaaaagaaaatggtaactcagggtaaccaggagccgacaacaactcctgacgcaatggttcagccttttactaccatcccatttccaccacctccgcagaatggaattcccacagagtatggggtgccacacactcaagactatgccggccagaccggtgagcataacctgacactctacggaagtacgcaagcccacggggagcagagcagcaactcacccagcacacaaaatggatctcttacgacagaaggtggagcacagacagacggccagcagtcacagacacaaagtagtgaaaattcagagagtaaatctaccccgaaacggctgcatgtctctaatattcctttccgcttccgggaccctgacctccggcagatgtttgggggattcgggttcgtaactttcgagaatagtgctgatgcagacagggccagggagaaattacacggcaccgtggtagagggccgtaaaatcgaggtgaataatgctacagcacgtgtaatgaccaataagaagatggtcacaccatatgcaaatggttggaaattaagcccagtagttggagctgtatatggtccggagttatatgcagcatccagctttcaagcagatgtgtccctaggcaatgatgcagcagtgcccctatcaggaagagggggtatcaacacttacattcctttaatcattcctggcttcccttaccctactgcagccaccacggcagccgctttcagaggagcccatttgaggggcagagggcggacagtatatggtgcagtccgagcggtacctccaacagccatccccgcctatccaggtgtggtttaccaggacggattttacggtgctgacctctatggtggatatgcagcctacagatatgcacagcctgctactgcaaccgcagccaccgctgctgcagccgctgcagccgcttacagtgacggttatggcagggtgtacacagccgacccctaccatgcccttgcccctgccgctagctatggagttggcgctgtggcgagtttataccgaggtggctacagccgatttgccccctactgaagtgacgtgagacccctgcaaatgggacagccccccagttcatgaggcctggctattgcaatatttactagtagaggaactctatagcaagatgaagaggaaaaacaaacaaacaaacaaaaaaaaacacaaaaaaagaaagaatacttttttatacctcactatgttctttgaatatgtatttttcctttaaatttctgcctttaattcttttgttccaaagattgtgcatttttttctttttttttttaaactgtggtaaaaaaaaaaaa

SEQ ID NO: 4568 - DNA, 6932 bp, Homo sapiens
  source 1..6932: mol_type = genomic DNA
attctccagcaggcctgcttctggagttgggagatgtcagcctgctgggagggggtggggggaggaggaagaggtggggctctactctgattaattaccttaggcattcaggggtggggcttccttcagccatctgcctgagatatgggagggagctggagaaagaaggagggggagagactgccagagaggaagagaaaagaaaggaagaaacattagaaagaaaaaggaaggaaaacggtataaagagagatcaattacccacccttaaatagctagattggggggggaggggggtggaaaagaaagctgtggaggtgtgccccagcacggctgctttgaaaggtttatcatctatccgtttggtttatggagaaaaagaaaatggtaactcagggtaaccaggagccgacaacaactcctgacgcaatggttcagccttttactaccatcccatttccaccacctccgcagaatggaattcccacagagtatggggtgccacacactcaagactatgccggccagaccggtgagcataacctgacactctacggaagtacgcaagcccacggggagcagagcagcaactcacccagcacacaaaatggatctcttacgcagacagaaggtggagcacagacagacggccagcagtcacagacacaaagtagtgaaaattcagagagtaaatctaccccgaaacggctgcatgtctctaatattcctttccgcttccgggaccctgacctccggcagatgtttgggcagtttggcaaaatcctagatgtagaaataatctttaatgaacgtggctctaagggattcgggttcgtaactttcgagaatagtgctgatgcagacagggccagggagaaattacacggcaccgtggtagagggccgtaaaatcgaggtgaataatgctacagcacgtgtaatgaccaataagaagatggtcacaccatatgcaaatggttggaaattaagcccagtagttggagctgtatatggtccggagttatatgcagcatccagctttcaagcagatgtgtccctaggcaatgatgcagcagtgcccctatcaggaagagggggtatcaacacttacattcctttaatcattcctggcttcccttaccctactgcagccaccacggcagccgctttcagaggagcccatttgaggggcagagggcggacagtatatggtgcagtccgagcggtacctccaacagccatccccgcctatccaggggtggatatgcagcctacagatatgcacagcctgctactgcaaccgcagccaccgctgctgcagccgctgcagccgcttacagtgacggttatggcagggtgtacacagccgacccctaccatgcccttgcccctgccgctagctatggagttggcgctgtggcgagtttataccgaggtggctacagccgatttgccccctactgaagtgacgtgagacccctgcaaatgggacagccccccagttcatgaggcctggctattgcaatatttactagtagaggaactctatagcaagatgaagaggaaaaacaaacaaacaaacaaaaaaaaacacaaaaaaagaaagaatacttttttatacctcactatgttctttgaatatgtatttttcctttaaatttctgcctttaattcttttgttccaaagattgtgcatttttttctttttttttttaaactgtggtaaaaaaaaaaaaaataatgcatttccatgtctgtatgtccgtgcttagcttattctatcaatcacggaagaggcagtcaaggaggaaggagagacattaggagccgataaatgcatctgatcagaaatcagcagacagaattaccaaagtgtatctggtgctgaatgactgggggacaagcagaagtggaagagatctttctgcaacaggatattcttctagtcttctgagtttctggtctttgacaggcaattctggttggctgtggctggaatccacatgctgatagataggaatttgtgcttacaaagcaggagaattaaaaagacgctttcctctcctcttccctcctgtcttctccgttctttttacaatcatcttacacgcacagcctgagacagctggcatagtttttggaattatagtattgatatttccaaacgtgctctcagacagtggataataaacacctcattaggaaaccgatctcagaatgaactctggagtatgaaaaagatcatttctttttgttcctgtaacctagcattccttctaggcttcttctcctttaattgaaccacagcttagctcatgtattcttttattaacaccctgctctcatgtccataagattcaggaatttaggacccagggacagaaaagtgaataagccagtgaccagatttcccccagatgtcttgaggattagaagtacaaattgttgacagccattaaagagggtgaggaagggaaaaggaatattagaagatctggtatttcttacttttttcttgcctcagaaagtacaaagtttaaaaaatagaataaagaatctgctggggaaagatagagtaccaggtcctaggtcagtagtccctggaagttttggtgatgaggacatggaagggcaggcagaggcactttgtacttgctccaaagccataggaattttcatcttccagagcctttatgagtcacttctctatccacagtcttgagcctgtggctatcccgctgagcttctcactgtcctccaaaaacaccccgctgagcacccggaccactttgtacacattaacactacaggacataaaatgcagaggccctgagattgctgccctcccatattggaaggagggtctgcgatggcaagggtcttctatatcaccagaaagagtcgcgcagtgagtcactgccgttgccatctggctgtaattttctatgttatcaaggtaggagggagtgtttctcttctagctgttagatagaactgataaaagcaagtgtcctacagcatttcccaaatgaaggcattaggaaatagaaaagcacggtctttttggctccctggtctagtcacattggtactagggtgacctttcacccaagggacagctgctaaagggagtaattcagagacatggagcttctggttatgggtttgttttgggtttgtttttaactcctgcctccacacatgttcttgactgataactgactcatgtccctgaattaaaatgactgacctatgacagcatcaagcattctttgtaagcagagtgatatatctgagagggcgttgacctgttgtgtagaatacatatcctttcccccttcagaatcctgtctcgcctcgtaactgggagagaggctgtgcctgaaactaggggcgatgtcaaggaagctagaggcctcgatgcaattattactgactctggggaggaagacagagaataaggggacaccaactgcccagtccactggccatttttaagggtccccccaccccaagccaaagtttggtttgttgctgttaagacaatttttgttgtatgtatataaatattttagttagaggagcggggaatgggatgcgggctttcacagttctagggaatgggggcagggaggattttgcttttgcttttgctttgagggagaactttagctgactaaaaaaacagaagtttggggtcatgatcacaaaggggccattcccaaaagatggcaagccacgtattcagtggagactaggccaaattctaaatggttttatccatagcaggggagaataggagaatgagtttaagagtttttctcttcttttttcctagaaagaggtaaggataatgggaaaggtagagaaggcggctcccacagaccttttaagagaggcagaatcttgagcttgaggcaccttgagtgcatctcagttcagctggttctggctgaggcctccaaaggcaagctctgtgctttccagtggtttctgctgcatttccagggatggtgtttaacaccgcttcctccagctcccttttctaagaaagaataaatggagttctgctttttatgaaagggtctttggttttcagtgtcaacactgagaattggggctcttgcaagcatctggatttcacagtatcaacctccccgtcaccttttgaactttgagactccgtacggtcaacttcaccagaggcaggttgctcgaagcagcactgcttgtctgttcctgactctggttctcactgtattaaaaaagagagtcagaggagtctggcatttcgtgagtttgttagaggatgctggctgataattccagaaaacttactgatgctaaatcacagtacatgcatgattctttttcagctttactatagttcatgacctggactttctgtactcttggaagctgggctccttaaaggaggcctctagtgaacacctttatctccatgtccctcttagagcccagagagctgcccataggcattttccagaattcctcatgtcacctagttcaatttccattaactcagatcagccattgtgattcaccatttgtcaggctctcaggtttaacaaaacctactatcaccatcatccttcaacagccacagtctgaattgagccaacatttttttttctttgagaaagaagtggactggggcacaacttttagtctgaggggagctagtggaaatctagacaatagaagtcatcgatagcagcttttcctcaaatgtgtgactcctcaggggctaaactgctcttagcttagaattatgctttactagagatctagcagataagtgggttaatcactaccatcctgtaactagttatatagcttccagacatgagggagacatcaaacagggatggaagcaaccccaaggatatgcaagaagggcatgatgaacccccttccctctggcaggagaacaaggccaaccaagggacagactggaaagcacttagatgtttaaggaggagaaaggggaagctttgaccagtccttgccttttgccaagttcagccagttctccgctgcttgcaacctctagcgcagtaacatttgcagaattgcagattttcccccagatactaggaggaaagggactttggggggtggggaaggggtcgtggtgttttaaaagcataagttacctgtttgcactgttttaagataggaaaaaaaaatagtgggcaaggtgaacatcagacgtaaatttgtgtgtttttattttgtcatgctcttgaaaatgtttgaccatttgtagtatacacagtgaaacttgattctctgttgcataaaacactatatttttttggaaatgttactgtccaaaagcctcttccctccctttccttttcctatgtacttccttcatacttgctttactgatcagccaggcaatagccatccaagagctagagcatgaaacagggccctttccaagtaggctctgggtgtcctaagccagcgtgtgccctctggtttagtgagtgtaatagagtccctggcacctttctttgcaaatgaggctaacagaccagactgcagcaagttatcagattcctcaatcagatgcactaggagtgaggagcccagggatggagggggttcctgaagtattgcagttggctgtagtagctgagttcttttccatgttaccgaaactgtagccagttacagtttactcaggaaaacggtagatcaattcagccatggtagtgctggttggcagggattggtaacggagagaactgctcatcagccaaaactcaagccttgccttttaggaggccaccagcagagggacttggtcctccttgtctggtacttgtgtacatgccggtgacctgaggactccactcacactggcgagcaaaaagggagcagtgattctcttttctctccccaccccctgccctttgttaccaacaccagtttcccagggggtacatgagtttctgaatttttaaaaaatgtttttggtttggtttttctggggactgataagtgctttaagcaatgtccataccccgtcaagactcccagcttagtcattttcttgtatttttctgttcacagtatttgtgtgtgtgcttgttttggcagctcattttggctgtattatatattgagtgatgaattgatcctcttttttccctaagggatatgaattgtttttcttgtgttatattctgcttgtgaatagctggagcaaacctggggctgacacgcgtaagctagggctgcaaagcgagaagagagccggtggagtgtacttgtccctgacaggctgacctacctgagtctctgagcttttcagtccaaatctttgcaaggctcaaaatgccacagaacctctcctcttctccccactccccatggcagggaccggaccatccctacatgcaacatgctgttcctccagcccctcccattgccatggcaaaacaggtacctttggggcatgggggcattacatgggatgcttgtgtaatcgaccacctagccttctctctcccctcccgtcctcccccagaatcacttcctaggacacccgagctgcttgcccagggtcctgtttccctgctaactccagagaagcatcccagggctttgtgacagtctctaattcccttcccttctcgttaagaatcatattgtatagtagctttcagaccatacagtattcattgggttactcctattattatcaagtagctggaattgtgaaggtcggagtagttagatctttagcttttattccttatttttttgtattactctccatgtgtataaattattgatcatgttgctggcttttataaactctaagcgaaggaggagcactgcctcagcctttgcacatggtaatgaagcactgtttttaaataaaagagagaaacacca

SEQ ID NO: 4569 - DNA, 1935 bp, Homo sapiens
  source 1..1935: mol_type = genomic DNA
ctgccagagaggaagagaaaagaaaggaagaaacattagaaagaaaaaggaaggaaaacggtataaagagagatcaattacccacccttaaatagctagattggggggggaggggggtggaaaagaaagctgtggaggtgtgccccagcacggctgctttgaaaggtttatcatctatccgtttggtttatggagaaaaagaaaatggtaactcagggtaaccaggagccgacaacaactcctgacgcaatggttcagccttttactaccatcccatttccaccacctccgcagaatggaattcccacagagtatggggtgccacacactcaagactatgccggccagaccggtgagcataacctgacactctacggaagtacgcaagcccacggggagcagagcagcaactcacccagcacacaaaatggatctcttacgacagaaggtggagcacagacagacggccagcagtcacagacacaaagtagtgaaaattcagagagtaaatctaccccgaaacggctgcatgtctctaatattcctttccgcttccgggaccctgacctccggcagatgtttgggcagtttggcaaaatcctagatgtagaaataatctttaatgaacgtggctctaagggattcgggttcgtaactttcgagaatagtgctgatgcagacagggccagggagaaattacacggcaccgtggtagagggccgtaaaatcgaggtgaataatgctacagcacgtgtaatgaccaataagaagatggtcacaccatatgcaaatggttggaaattaagcccagtagttggagctgtatatggtccggagttatatgcagcatccagctttcaagcagatgtgtccctaggcaatgatgcagcagtgcccctatcaggaagagggggtatcaacacttacattcctttaatcagtctccctttagttcctggcttcccttaccctactgcagccaccacggcagccgctttcagaggagcccatttgaggggcagagggcggacagtatatggtgcagtccgagcggtacctccaacagccatccccgcctatccaggtgtggtttaccaggacggattttacggtgctgacctctatggtggatatgcagcctacagatatgcacagcctgctactgcaaccgcagccaccgctgctgcagccgctgcagccgcttacagtgacggttatggcagggtgtacacagccgacccctaccatgcccttgcccctgccgctagctatggagttggcgctgtggcgagtttataccgaggtggctacagccgatttgccccctactgaagtgacgtgagacccctgcaaatgggacagccccccagttcatgaggcctggctattgcaatatttactagtagaggaactctatagcaagatgaagaggaaaaacaaacaaacaaacaaaaaaaaacacaaaaaaagaaagaatacttttttatacctcactatgttctttgaatatgtatttttcctttaaatttctgcctttaattcttttgttccaaagattgtgcatttttttctttttttttttaaactgtggtaaaaaaaaaaaaaataatgcatttccatgtctgtatgtccgtgcttagcttattctatcaatcacggaagaggcagtcaaggaggaaggagagacattaggagccgataaatgcatctgatcagaaatcagcagacagaattaccaaagtgtatctggtgctgaatgactgggggacaagcagaagtggaagagatctttctgcaacaggatattcttctagtcttctgagtttctggtctttgacaggcaattctggttggctgtggctggaatccacatgctgatagataggaatttgtgcttacaaagcaggagaattaaaaagacgctttcctctcctc

SEQ ID NO: 4570 - DNA, 1706 bp, Homo sapiens
  source 1..1706: mol_type = genomic DNA
atggagaaaaagaaaatggtaactcagggtaaccaggagccgacaacaactcctgacgcaatggttcagccttttactaccatcccatttccaccacctccgcagaatggaattcccacagagtatggggtgccacacactcaagactatgccggccagaccggtgagcataacctgacactctacggaagtacgcaagcccacggggagcagagcagcaactcacccagcacacaaaatggatctcttacgacagaaggtggagcacagacagacggccagcagtcacagacacaaagtagtgaaaattcagagagtaaatctaccccgaaacggctgcatgtctctaatattcctttccgcttccgggaccctgacctccggcagatgtttgggcagtttggcaaaatcctagatgtagaaataatctttaatgaacgtggctctaagggattcgggttcgtaactttcgagaatagtgctgatgcagacagggccagggagaaattacacggcaccgtggtagagggccgtaaaatcgaggtgaataatgctacagcacgtgtaatgaccaataagaagatggtcacaccatatgcaaatggttggaaattaagcccagtagttggagctgtatatggtccggagttatatgcagcatccagctttcaagcagatgtgtccctaggcaatgatgcagcagtgcccctatcaggaagagggggtatcaacacttacattcctttaatcagtctccctttagttcctggcttcccttaccctactgcagccaccacggcagccgctttcagaggagcccatttgaggggcagagggcggacagtatatggtgcagtccgagcggtacctccaacagccatccccgcctatccaggggtggatatgcagcctacagatatgcacagcctgctactgcaaccgcagccaccgctgctgcagccgctgcagccgcttacagtgacggttatggcagggtgtacacagccgacccctaccatgcccttgcccctgccgctagctatggagttggcgctgtggcgagtttataccgaggtggctacagccgatttgccccctactgaagtgacgtgagacccctgcaaatgggacagccccccagttcatgaggcctggctattgcaatatttactagtagaggaactctatagcaagatgaagaggaaaaacaaacaaacaaacaaaaaaaaacacaaaaaaagaaagaatacttttttatacctcactatgttctttgaatatgtatttttcctttaaatttctgcctttaattcttttgttccaaagattgtgcatttttttctttttttttttaaactgtggtaaaaaaaaaaaaaataatgcatttccatgtctgtatgtccgtgcttagcttattctatcaatcacggaagaggcagtcaaggaggaaggagagacattaggagccgataaatgcatctgatcagaaatcagcagacagaattaccaaagtgtatctggtgctgaatgactgggggacaagcagaagtggaagagatctttctgcaacaggatattcttctagtcttctgagtttctggtctttgacaggcaattctggttggctgtggctggaatccacatgctgatagataggaatttgtgcttacaaagcaggagaattaaaaagacgctttcctctcctc

SEQ ID NO: 4571 - DNA, 1254 bp, Homo sapiens
  source 1..1254: mol_type = genomic DNA
agaaagctgtggaggtgtgccccagcacggctgctttgaaaggtttatcatctatccgtttggtttatggagaaaaagaaaatggtaactcagggtaaccaggagccgacaacaactcctgacgcaatggttcagccttttactaccatcccatttccaccacctccgcagaatggaattcccacagagtatggggtgccacacactcaagactatgccggccagaccggtgagcataacctgacactctacggaagtacgcaagcccacggggagcagagcagcaactcacccagcacacaaaatggatctcttacgacagaaggtggagcacagacagacggccagcagtcacagacacaaagtagtgaaaattcagagagtaaatctaccccgaaacggctgcatgtctctaatattcctttccgcttccgggaccctgacctccggcagatgtttgggcagtttggcaaaatcctagatgtagaaataatctttaatgaacgtggctctaagggattcgggttcgtaactttcgagaatagtgctgatgcagacagggccagggagaaattacacggcaccgtggtagagggccgtaaaatcgaggtgaataatgctacagcacgtgtaatgaccaataagaagatggtcacaccatatgcaaatggttggaaattaagcccagtagttggagctgtatatggtccggagttatatgcagcatccagctttcaagcagatgtgtccctaggcaatgatgcagcagtgcccctatcaggaagagggggtatcaacacttacattcctttaatcattcctggcttcccttaccctactgcagccaccacggcagccgctttcagaggagcccatttgaggggcagagggcggacagtatatggtgcagtccgagcggtacctccaacagccatccccgcctatccaggtgtggtttaccaggacggattttacggtgctgacctctatggtggatatgcagcctacagatatgcacagcctgctactgcaaccgcagccaccgctgctgcagccgctgcagccgcttacagtgacggttatggcagggtgtacacagccgacccctaccatgcccttgcccctgccgctagctatggagttggcgctgtggcgagtttataccgaggtggctacagccgatttgccccctactgaagtgacgtgagacccctgcaaatgggacagccccccagttcatgaggcctggctatt

SEQ ID NO: 4572 - DNA, 2678 bp, Homo sapiens
  source 1..2678: mol_type = genomic DNA
caaagcagacctcacctcccactaccagcttgaagtcacagcagccagaggaaattctgccaccattttcccaggtctgcagcccctccagctgggaacctgctcctggagccatccctctgcaaacagagagcccagagtgcctcggggaaaattggctgaataaaagagcgatcaggacgccacggctccgcctgaagcgatggcccagccctacccccccgcccagtacccccctccgccacagaacggcatccctgccgagtacgccccgcccccaccgcaccccacgcaggactactccggccagaccccggtccccacagagcatggcatgaccctgtacacaccagcacagacccaccccgagcagccaggctccgaggccagcacacagcccatcgccgggacccagacagtgccgcagacagacgaggcggcacagacggacagccagccgctccacccctccgaccctacagagaagcagcagcccaagcggctacacgtctccaacatccccttccggttcagggaccccgacttgcggcaaatgttcgggcaattcggaaaaattttagacgtggagatcatttttaacgagcggggctccaagggttttgggtttgtaacttttgaaactagctcagatgctgaccgagcccgggagaagctgaatgggacgatcgtagagggacggaaaattgaggtcaataatgccacggcccgagtgatgaccaacaagaagacggggaacccctacaccaacggctggaagctaaatccagtggtcggcgcagtctacgggcctgaattctatgcagtgacggggttcccctaccccaccaccggcacagccgttgcctaccggggcgcacatcttcggggccggggccgggccgtgtataatacatttcgggctgcgccacccccaccccccatcccgacttacggagcggtcgtgtatcaggatggattttatggtgctgagatttatggaggctacgcagcctacagatacgctcagcccgctgcagcggcggcagcctacagcgacagttacggcagagtctacgcagctgccgacccgtaccatcacaccatcgggcccgcggcgacctacagcattggaaccatgtgaaaccttccaccgtttccttctcggaccatgaagggcaaaaacaaaaaaacaaaaaaaatcacaaaacaaaaaaaacaaaaaaagatgttaagatccaagcaacaaaaaaaaaaccaaccaaaccaagaggcatccaaccaagtccaagtcccgcgtcctggccacacgcccgcaccgagggagcacgccggcaggggcgccgaggagcggccccaggacaggacggccccaccgcgtcctggctggcagcacagtgggaacacgcccctccgtctcaggcagtgggggagttggaggggaaggggcctcccttgtgggacccgtggggggctctgttttccatccagtcttcctttcccagcccccaactcccaagacagacagtgtggagcccagcggcggcggagcaggcccgggcctgagcaggcaggcgctgctagcaagacttgatctttgtggccagctgtgccagggggccggcggggctgaggggtgcgggcagctttcatcccaggggctccactgggccccgtcaccctcctgtcgcgtcccctgcgtcccacctccctcctgcccggcagtcccgcccgtgcccccagcctggcgaggaagccgtccaacagtagccccggggccagctcccaacagaaagggctgacgtggctccaggactcaggggcgctccatgggaggacgaaggaagcccagccagccaggagccactcctcacacctccaagtgtggccaagtgggccctgaggccaaggacttacttgctcttcctggccatctctccctttctggaggaggcccggggcctgtgtacaccaaggctgacctcgtgctgcctgctgggacccagccctccctgccgctcccctgtgagcccagtccaccgtgggcgcccagggccagggacgggccagcgcccggctgcatcgcgaggttgggagtcacagtggctgtgggcctggacgggcacagccagagcaggggcccatgggaagggcaagggatggggaagcctgggccggccccttccctgctcccaaggcaggtgtccaggtggcgggagcagcaccaaggacagccaggcttacccggtgggaggagcaggagcagagcaggtggcagggaggaacccctggcgaggcagggagcactgaagtagggaagcagcaaaaaatacaggctcccaacgtggctccactgtctcatgaagtgtcaaaaatttaaaaatacacctcactttctattcagcatcagctattgaaatggaattctccttttctattcccgttgtacatagccccacgccctgcctccggctttgtcctctgtacagagccccctgtcccctctgctgttccggacccttttcttgcagcagctcaaccccccgactcactcagatccccaggactgcagccgagccccgggcttcctttcttaccattctgtatgcttccaaggtgtgaccattcaaactaacagtattattaagattattaataaagatttctttcttcaaaccagg

SEQ ID NO: 4573 - DNA, 1519 bp, Homo sapiens
  source 1..1519: mol_type = genomic DNA
gatacagcagcagctggtgctcctggccaggctgtgcgtgctctctctgcctctctctctcggactctctgctctctctctctgactctctcctctctctctgttggcctggtgaaatgttcttggctgtaggcacacagagccttggactcaaggctgttggagtcgaggacaccttgacttcggtcctggaggttgaaattctgcctctgagaagctaacagtcttcctgtggtcgccactcctccccagcagccccctccttgccaaggacggtccagaaggagccccactggggcctccccgctcagcaaagcagacctcacctcccactaccagcttgaagtcacagcagccagaggaaattctgccaccattttcccaggtctgcagcccctccagctgggaacctgctcctggagccatccctctgcaaacagagagcccagagtgcctcggggaaaattggctgaataaaagagcgatcaggacgccacggctccgcctgaagcgatggcccagccctacccccccgcccagtacccccctccgccacagaacggcatccctgccgagtacgccccgcccccaccgcaccccacgcaggactactccggccagaccccggtccccacagagcatggcatgaccctgtacacaccagcacagacccaccccgagcagccaggctccgaggccagcacacagcccatcgccgggacccagacagtgccgcagacagacgaggcggcacagacggacagccagccgctccacccctccgaccctacagagaagcagcagcccaagcggctacacgtctccaacatccccttccggttcagggaccccgacttgcggcaaatgttcgggcaattcggaaaaattttagacgtggagatcatttttaacgagcggggctccaagggttttgggtttgtaacttttgaaactagctcagatgctgaccgagcccgggagaagctgaatgggacgatcgtagagggacggaaaattgaggtcaataatgccacggcccgagtgatgaccaacaagaagacggggaacccctacaccaacggctggaagctaaatccagtggtcggcgcagtctacgggcctgaattctatgcagtgacggggttcccctaccccaccaccggcacagccgttgcctaccggggcgcacatcttcggggccggggccgggccgtgtataatacatttcgggctgcgccacccccaccccccatcccgacttacggagcggtcgtgtatcaggatggattttatggtgctgagatttatggaggctacgcagcctacagatacgctcagcccgctgcagcggcggcagcctacagcgacagttacggcagagtctacgcagctgccgacccgtaccatcacaccatcgggcccgcggcgacctacagcattggaaccatgtgaaaccttccaccgtttccttctcggaccatgaagggcaaaaacaaaaaaacaaaaaaaatcacaaaac

SEQ ID NO: 4574 - DNA, 3681 bp, Homo sapiens
  source 1..3681: mol_type = genomic DNA
gggaaccggaaggtgcggtggcactcacggaatctcgggtcttctgacgtgccgggcgggaagatgtcatcattgccaagaagagcgaaagtacaggtccaggatgtggtactgaaagatgaattttcttcattctctgagttatcatctgcctctgaagaagatgacaaggaagatagtgcctgggagccccaaaagaaagttcccagaagccgtaaacagccccctcccaaggaatccaaaccaaagaggatgcctcgggtgaagaagaatgccccacagatcagtgatggctcagaagtcgttgttgttaaggaggagctgaatagctctgtggctattgctgatactgctttagaagacagaaaaaataaattggatactgtacagactctgaaaacagccaagacaaaacagaaatgtgcagcgcagccacatacagttcgaaggactaaaaagctgaaagttgaagaagaaaccagcaaagccagcaacttagagggtgagagtaatagttcagagacaccatccacaagcactgtgtggggaggtacatgcaagaaggaagagaatgacgatgactttacatttggtcagtccgctttaaagaaaatcaagactgagacatatcctcaggggcagcctgtcaagtttccagcaaatgccaatagtactaaagaggaggtggaaatgaattgggacatggtacaggttttatctgagagaactaatattgaaccttgggtttgtgccaacatcattcgtctctttaatgatgataacacaattcccttcattatacgttatagaaaagagctcattaataaccttgatgctgattccttgagagaagttcagcaaaccctagaagagctacgggctgttgcaaagaaagttcatagtacaatccagaaaattaagaaggaagggaagatgtctgagtgcttgttaaaagccatgctgaattgtaaaacttttgaagaactagaacacgtgtctgctccatataaaactggaagcaaagggactaaagcccagagagcaagacagttgggcttagaaggagcagccagggcactgcttgagaaaccaggggagctcagtctgctatcgtacattaggcctgacgttaaagggctttcaacgcttcaggatattgaaataggagtgcagcatattttagcagatatgattgctaaagacaaagacacgcttgacttcattcggaacttgtgccagaagagacatgtttgtatccagtcatctctggcaaaagtatcctcaaaaaaggtaaatgagaaagatgttgataagtttctgctctaccagcatttttcctgcaacataagaaacattcaccatcatcagattctggcaattaaccgtggagaaaatttgaaggtactgacggttaaggtcaatatttctgatggagtgaaggatgaattctgtaggtggtgcatccaaaacaggtggagaccacgtagctttgcaaggccagagttaatgaagatcttatataattcactgaatgattcctttaaacgccttatttatcctcttctctgtagagaattcagagccaaactaacatcagatgcagagaaggaatcagtaatgatgtttggacggaaccttcgtcagctccttttaacaagccctgttccagggcgcaccttaatgggagtggatcctggttataaacatggttgcaaattagctataatttctcctactagtcagatacttcatactgatgtggtttacttgcattgtggacaaggcttccgagaggcggagaaaataaagacacttttgctgaatttcaactgcagcacagtagtgattggaaatggaactgcctgcagggaaacagaagcttactttgctgacctgataatgaagaattattttgcaccactggatgttgtttactgtatcgtcagtgaagcaggagcatcaatctacagtgtcagccctgaagctaacaaagagatgccagggctggaccctaatttgagaagtgcagtttccatagcaaggcgtgtacaagatccattagctgagctagtgaaaattgagccaaagcacattggagttggaatgtatcagcatgacgtatcccagactttactcaaggcaacactggacagtgttgtagaagaatgtgtcagctttgtgggagtggatattaacatctgttcagaagttttgttaaggcatattgcaggactcaatgccaacagggccaaaaatattattgaatggcgagagaaaaatggaccctttatcaaccgagaacagctgaagaaagtgaaagggctgggcccaaaatccttccaacagtgtgctggcttcatcagaatcaaccaggattatatccgaacgttttgcagtcagcaaactgaaacttcaggccaaattcaaggagttgctgtgacatcttcagcagacgttgaggtcacaaatgagaagcagggcaaaaagaagagcaaaactgcagtgaatgttttactgaagccaaatcctttggaccaaacttgtattcatccagaatcatatgacatagcaatgaggtttttgtcatccattggagggacactgtatgaggttggaaagcctgaaatgcaacaaaaaataaattcattccttgaaaaggaaggaatggagaaaattgcagaaagattgcaaacaacagtacacaccttacaggtcatcatagatggtctcagccagcctgaaagctttgactttcgaacagattttgataaacctgatttcaagagaagcatagtatgcctggaagatctgcagattgggacagttcttacaggcaaagttgagaatgccactctctttggaatttttgtggatataggagtggggaaatctgggctgattcccatacgaaatgtaacagaagcaaaactttcaaaaacaaagaagagaagaagccttggactgggccccggagaaagagtggaagtccaagtactcaacattgacatcccccgatctaggattactctggacctcattcgggtgttatgagtatcccacgaaggccagacgctgattttattttctcatttccacagattgacaaggataagtcagttgtttgtaaactctaggtagcagatgagaaataattcacttaatatcagaaatattttccaaacactttcctttattttttcttctgaataaatagaaaaccaacagtttgatttccttttcccttaaaggaaacaactaatacacattcttatatggctttatgtagtaatagttttctgactaaaattttgttttttattttttgtaatttatctttaactccttttgcattttgtataacagattgcttaacttctacttgccaacatctgccttgctggacttgtatgggattgtcttcttgatttgaattgtaccgtctttgttgacacagtagggctgggcagtgtttaatccttccattttatagatttttttttaatcaggccttttggacttcattcataattttgcaataatctcttttcccttgtcatgcaagccaaaaatataccagtaaaacagattctgacgtgtttgtagttatcaaatgaatggctcgaaacacttctcaaaaggatatacgtattgaccccaacaataaatgtttgtggctagtga

SEQ ID NO: 4575 - DNA, 1980 bp, Homo sapiens
  source 1..1980: mol_type = genomic DNA
agtttctgtcccaagctttattatttctgttaccttattcccttctccaccatgggtcttcctgtgtgtcaggattttttattctggcaattaaccgtggagaaaatttgaaggtactgacggttaaggtcaatatttctgatggagtgaaggatgaattctgtaggtggtgcatccaaaacaggtggagaccacgtagctttgcaaggccagagttaatgaagatcttatataattcactgaatgattcctttaaacgccttatttatcctcttctctgtagagaattcagagccaaactaacatcagatgcagagaaggaatcagtaatgatgtttggacggaaccttcgtcagctccttttaacaagccctgttccagggcgcaccttaatgggagtggatcctggttataaacatggttgcaaattagctataatttctcctactagtcagatacttcatactgatgtggtttacttgcattgtggacaaggcttccgagaggcggagaaaataaagacacttttgctgaatttcaactgcagcacagtagtgattggaaatggaactgcctgcagggaaacagaagcttactttgctgacctgataatgaagaattattttgcaccactggatgttgtttactgtatcgtcagtgaagcaggagcatcaatctacagtgtcagccctgaagctaacaaagagatgccagggctggaccctaatttgagaagtgcagtttccatagcaaggcgtgtacaagatccattagctgagctagtgaaaattgagccaaagcacattggagttggaatgtatcagcatgacgtatcccagactttactcaaggcaacactggacagtgttgtagaagaatgtgtcagctttgtgggagtggatattaacatctgttcagaagttttgttaaggcatattgcaggactcaatgccaacagggccaaaaatattattgaatggcgagagaaaaatggaccctttatcaaccgagaacagctgaagaaagtgaaagggctgggcccaaaatccttccaacagtgtgctggcttcatcagaatcaaccaggattatatccgaacgttttgcagtcagcaaactgaaacttcaggccaaattcaaggagttgctgtgacatcttcagcagacgttgaggtcacaaatgagaagcagggcaaaaagaagagcaaaactgcagtgaatgttttactgaagccaaatcctttggaccaaacttgtattcatccagaatcatatgacatagcaatgaggtttttgtcatccattggagggacactgtatgaggttggaaagcctgaaatgcaacaaaaaataaattcattccttgaaaaggaaggaatggagaaaattgcagaaagattgcaaacaacagtacacaccttacaggtcatcatagatggtctcagccagcctgaaagctttgactttcgaacagattttgataaacctgatttcaagagaagcatagtatgcctggaagatctgcagattgggacagttcttacaggcaaagttgagaatgccactctctttggaatttttgtggatataggagtggggaaatctgggctgattcccatacgaaatgtaacagaagcaaaactttcaaaaacaaagaagagaagaagccttggactgggccccggagaaagagtggaagtccaagtactcaacattgacatcccccgatctaggattactctggacctcattcgggtgttatgagtatcccacgaaggccagacgctgattttattttctcatttccacagattgacaaggataagtcagttgtttgtaaactctaggtagcagatgagaaataattcacttaatatcagaaatattttccaaacactttcctttattttttcttctgaataaatagaaaaccaacagtttgatttccttttcccttaaaggaaacaactaatacacattc

SEQ ID NO: 4576 - DNA, 3482 bp, Homo sapiens
  source 1..3482: mol_type = genomic DNA
atcttgtgggaagagctgaagcaggcgctcttggctcggcgcggcccgctgcaatccgtggaggaacgcgccgccgagccaccatcatgcctgggcacttacaggaaggcttcggctgcgtggtcaccaaccgattcgaccagttatttgacgacgaatcggaccccttcgaggtgctgaaggcagcagagaacaagaaaaaagaagccggcgggggcggcgttgggggccctggggccaagagcgcagctcaggccgcggcccagaccaactccaacgcggcaggcaaacagctgcgcaaggagtcccagaaagaccgcaagaacccgctgccccccagcgttggcgtggttgacaagaaagaggagacgcagccgcccgtggcgcttaagaaagaaggaataagacgagttggaagaagacctgatcaacaacttcagggtgaagggaaaataattgatagaagaccagaaaggcgaccacctcgtgaacgaagattcgaaaagccacttgaagaaaagggtgaaggaggcgaattttcagttgatagaccgattattgaccgacctattcgaggtcgtggtggtcttggaagaggtcgagggggccgtggacgtggaatgggccgaggagatggatttgattctcgtggcaaacgtgaatttgataggcatagtggaagtgatagatcttctttttcacattacagtggcctgaagcacgaggacaaacgtggaggtagcggatctcacaactggggaactgtcaaagacgaattaacagagtcccccaaatacattcagaaacaaatatcttataattacagtgacttggatcaatcaaatgtgactgaggaaacacctgaaggtgaagaacatcatccagtggcagacactgaaaataaggagaatgaagttgaagaggtaaaagaggagggtccaaaagagatgactttggatgagtggaaggctattcaaaataaggaccgggcaaaagtagaatttaatatccgaaaaccaaatgaaggtgctgatgggcagtggaagaagggatttgttcttcataaatcaaagagtgaagaggctcatgctgaagattcggttatggaccatcatttccggaagccagcaaatgatataacgtctcagctggagatcaattttggagaccttggccgcccaggacgtggcggcaggggaggacgaggtggacgtgggcgtggtgggcgcccaaaccgtggcagcaggaccgacaagtcaagtgcttctgctcctgatgtggatgacccagaggcattcccagctctggcttaactggatgccataagacaaccctggttcctttgtgaacccttctgttcaaagcttttgcatgcttaaggattccaaacgactaagaaattaaaaaaaaaaagactgtcattcataccattcacacctaaagactgaattttatctgttttaaaaatgaacttctcccgctacacagaagtaacaaatatggtagtcagttttgtatttagaaatgtattggtagcagggatgttttcataattttcagagattatgcattcttcatgaatacttttgtattgctgcttgcaaatatgcatttccaaacttgaaatataggtgtgaacagtgtgtaccagtttaaagctttcacttcatttgtgttttttaattaaggatttagaagttcccccaattacaaactggttttaaatattggacatactggttttaatacctgctttgcatattcacacatggtcaactgggacatgttaaactttgatttgtcaaattttatgctgtgtggaatactaactatatgtattttaacttagttttaatattttcatttttggggaaaaatcttttttcacttctcatgatagctgttatatatatatgctaaatctttatatacagaaatatcagtacttgaacaaattcaaagcacatttggtttattaacccttgctccttgcatggctcattaggttcaaattataactgatttacattttcagctatatttactttttaaatgcttgagtttcccattttaaaatctaaactagacatcttaattggtgaaagttgtttaaactacttattgttggtaggcacatcgtgtcaagtgaagtagttttataggtatgggttttttctcccccttcaccagggtgggtggaataagttgatttggccaatgtgtaatatttaaactgttctgtaaaataagtgtctggccatttggtatgatttctgtgtgtgaaaggtcccaaaatcaaaatggtacatccataatcagccaccatttaacccttccttgttctaaaacaaaaaccaaagggcgctggttggtagggtgaggtgggggagtattttaatttttggaatttgggaagcagacagctttactttgtaaggttggaacagcagcactatacatgaaatataaaccaaaaacctttactgtttctaaatttcctagattgctattatttggttgtaagttgagtattccacagaaagtggtaattatctcttctctcttcctccattagaaaattaggtaaataatggattcctataatgggagcatcaccacttattaaaacacacatagaatgatgaattaaaaaagttttctaggattgtcttttattctgccacatttattgataaacagtgaaggaatttttaaaaaatttttaagaattgtttgtcacgtcatttttagaaatgttctacctgtatatggtaatgtccagttttaaaaatattggacatcttcaatcttaaacatttctatttagctgattggttctcacatatacttctaaaagaaacttttatgttataagagttactttttggataagatttattaatctcagttacctactattctgacattttaggaaggaggtaattgtttttaatgatggataaacttgtgctggtgttttggatcttatgatgctgagcatgttctgcactggtgctaatgtctaatataattttatatttacacacatacgtgctacccagagattaatttagtccatatgaactattgacccattgttcattgagacagcaacatacgcactcctaaatcagtgtgtttagacttttcaagtatctaactcatttccaaacatgtaccatgttttataaacctcttgatttccagcaacatactatagaaaacacctgctactcaaaacacaacttctcagtgtcatccattgctgtcgtgagagacaacatagcaatatctggtatgttgcaagctttcaagatagcctgaacttaaaaagttggtgcattagttgtatctgatggatataaatttgcctcctagttcactttgtgtcaagagctaaaactgtgaacctaactttctcttattggtgggtaataactgaaaataaagatttattttcatgctcacttcttaaaagtcat

SEQ ID NO: 4577 - DNA, 2103 bp, Homo sapiens
  source 1..2103: mol_type = genomic DNA
tctcggcccggccatcttgtgggaagagctgaagcaggcgctcttggctcggcgcggcccgctgcaatccgtggaggaacgcgccgccgagccaccatcatgcctgggcacttacaggaaggcttcggctgcgtggtcaccaaccgattcgaccagttatttgacgacgaatcggaccccttcgaggtgctgaaggcagcagagaacaagaaaaaagaagccggcgggggcggcgttgggggccctggggccaagagcgcagctcaggccgcggcccagaccaactccaacgcggcaggcaaacagctgcgcaaggagtcccagaaagaccgcaagaacccgctgccccccagcgttggcgtggttgacaagaaagaggagacgcagccgcccgtggcgcttaagaaagaaggaataagacgagttggaagaagacctgatcaacaacttcagggtgaagggaaaataattgatagaagaccagaaaggcgaccacctcgtgaacgaagattcgaaaagccacttgaagaaaagggtgaaggaggcgaattttcagttgatagaccgattattgaccgacctattcgaggtcgtggtggtcttggaagaggtcgagggggccgtggacgtggaatgggccgaggagatggatttgattctcgtggcaaacgtgaatttgataggcatagtggaagtgatagatcttctttttcacattacagtggcctgaagcacgaggacaaacgtggaggtagcggatctcacaactggggaactgtcaaagacgaattaactgacttggatcaatcaaatgtgactgaggaaacacctgaaggtgaagaacatcatccagtggcagacactgaaaataaggagaatgaagttgaagaggtaaaagaggagggtccaaaagagatgactttggatgagtggaaggctattcaaaataaggaccgggcaaaagtagaatttaatatccgaaaaccaaatgaaggtgctgatgggcagtggaagaagggatttgttcttcataaatcaaagagtgaagaggctcatgctgaagattcggttatggaccatcatttccggaagccagcaaatgatataacgtctcagctggagatcaattttggagaccttggccgcccaggacgtggcggcaggggaggacgaggtggacgtgggcgtggtgggcgcccaaaccgtggcagcaggaccgacaagtcaagtgcttctgctcctgatgtggatgacccagaggcattcccagctctggcttaactggatgccataagacaaccctggttcctttgtgaacccttctgttcaaagcttttgcatgcttaaggattccaaacgactaagaaattaaaaaaaaaaagactgtcattcataccattcacacctaaagactgaattttatctgttttaaaaatgaacttctcccgctacacagaagtaacaaatatggtagtcagttttgtatttagaaatgtattggtagcagggatgttttcataattttcagagattatgcattcttcatgaatacttttgtattgctgcttgcaaatatgcatttccaaacttgaaatataggtgtgaacagtgtgtaccagtttaaagctttcacttcatttgtgttttttaattaaggatttagaagttcccccaattacaaactggttttaaatattggacatactggttttaatacctgctttgcatattcacacatggtcaactgggacatgttaaactttgatttgtcaaattttatgctgtgtggaatactaactatatgtattttaacttagttttaatattttcatttttggggaaaaatcttttttcacttctcatgatagctgttatatatatatgctaaatctttatatacagaaatatcagtacttgaacaaattcaaagcacatttggtttattaacccttgctccttgcatggctcattaggttcaaattataactgatttacattttcagctatatttactttttaaatgcttgagtttcccattttaaaatctaaactagacatcttaattggtgaaagttgtttaaactacttattgttggtaggcac

SEQ ID NO: 4578 - DNA, 6676 bp, Homo sapiens
  source 1..6676: mol_type = genomic DNA
gaagacggcccccctctctcggcccggccatcttgtgggaagagctgaagcaggcgctcttggctcggcgcggcccgctgcaatccgtggaggaacgcgccgccgagccaccatcatgcctgggcacttacaggaaggcttcggctgcgtggtcaccaaccgattcgaccagttatttgacgacgaatcggaccccttcgaggtgctgaaggcagcagagaacaagaaaaaagaagccggcgggggcggcgttgggggccctggggccaagagcgcagctcaggccgcggcccagaccaactccaacgcggcaggcaaacagctgcgcaaggagtcccagaaagaccgcaagaacccgctgccccccagcgttggcgtggttgacaagaaagaggagacgcagccgcccgtggcgcttaagaaagaaggaataagacgagttggaagaagacctgatcaacaacttcagggtgaagggaaaataattgatagaagaccagaaaggcgaccacctcgtgaacgaagattcgaaaagccacttgaagaaaagggtgaaggaggcgaattttcagttgatagaccgattattgaccgacctattcgaggtcgtggtggtcttggaagaggtcgagggggccgtggacgtggaatgggccgaggagatggatttgattctcgtggcaaacgtgaatttgataggcatagtggaagtgatagatctggcctgaagcacgaggacaaacgtggaggtagcggatctcacaactggggaactgtcaaagacgaattaactgacttggatcaatcaaatgtgactgaggaaacacctgaaggtgaagaacatcatccagtggcagacactgaaaataaggagaatgaagttgaagaggtaaaagaggagggtccaaaagagatgactttggatgagtggaaggctattcaaaataaggaccgggcaaaagtagaatttaatatccgaaaaccaaatgaaggtgctgatgggcagtggaagaagggatttgttcttcataaatcaaagagtgaagaggctcatgctgaagattcggttatggaccatcatttccggaagccagcaaatgatataacgtctcagctggagatcaattttggagaccttggccgcccaggacgtggcggcaggggaggacgaggtggacgtgggcgtggtgggcgcccaaaccgtggcagcaggaccgacaagtcaagtgcttctgctcctgatgtggatgacccagaggcattcccagctctggcttaactggatgccataagacaaccctggttcctttgtgaacccttctgttcaaagcttttgcatgcttaaggattccaaacgactaagaaattaaaaaaaaaaagactgtcattcataccattcacacctaaagactgaattttatctgttttaaaaatgaacttctcccgctacacagaagtaacaaatatggtagtcagttttgtatttagaaatgtattggtagcagggatgttttcataattttcagagattatgcattcttcatgaatacttttgtattgctgcttgcaaatatgcatttccaaacttgaaatataggtgtgaacagtgtgtaccagtttaaagctttcacttcatttgtgttttttaattaaggatttagaagttcccccaattacaaactggttttaaatattggacatactggttttaatacctgctttgcatattcacacatggtcaactgggacatgttaaactttgatttgtcaaattttatgctgtgtggaatactaactatatgtattttaacttagttttaatattttcatttttggggaaaaatcttttttcacttctcatgatagctgttatatatatatgctaaatctttatatacagaaatatcagtacttgaacaaattcaaagcacatttggtttattaacccttgctccttgcatggctcattaggttcaaattataactgatttacattttcagctatatttactttttaaatgcttgagtttcccattttaaaatctaaactagacatcttaattggtgaaagttgtttaaactacttattgttggtaggcacatcgtgtcaagtgaagtagttttataggtatgggttttttctcccccttcaccagggtgggtggaataagttgatttggccaatgtgtaatatttaaactgttctgtaaaataagtgtctggccatttggtatgatttctgtgtgtgaaaggtcccaaaatcaaaatggtacatccataatcagccaccatttaacccttccttgttctaaaacaaaaaccaaagggcgctggttggtagggtgaggtgggggagtattttaatttttggaatttgggaagcagacagctttactttgtaaggttggaacagcagcactatacatgaaatataaaccaaaaacctttactgtttctaaatttcctagattgctattatttggttgtaagttgagtattccacagaaagtggtaattatctcttctctcttcctccattagaaaattaggtaaataatggattcctataatgggagcatcaccacttattaaaacacacatagaatgatgaattaaaaaagttttctaggattgtcttttattctgccacatttattgataaacagtgaaggaatttttaaaaaatttttaagaattgtttgtcacgtcatttttagaaatgttctacctgtatatggtaatgtccagttttaaaaatattggacatcttcaatcttaaacatttctatttagctgattggttctcacatatacttctaaaagaaacttttatgttataagagttactttttggataagatttattaatctcagttacctactattctgacattttaggaaggaggtaattgtttttaatgatggataaacttgtgctggtgttttggatcttatgatgctgagcatgttctgcactggtgctaatgtctaatataattttatatttacacacatacgtgctacccagagattaatttagtccatatgaactattgacccattgttcattgagacagcaacatacgcactcctaaatcagtgtgtttagacttttcaagtatctaactcatttccaaacatgtaccatgttttataaacctcttgatttccagcaacatactatagaaaacacctgctactcaaaacacaacttctcagtgtcatccattgctgtcgtgagagacaacatagcaatatctggtatgttgcaagctttcaagatagcctgaacttaaaaagttggtgcattagttgtatctgatggatataaatttgcctcctagttcactttgtgtcaagagctaaaactgtgaacctaactttctcttattggtgggtaataactgaaaataaagatttattttcatgctcacttcttaaaagtcataaaaacaatcaaataggatcatgtttattgtcatgtgtttcctggtttctgacctgtgtgcacacccctgtgtgtttataatttttaaattgaattttatatggggtttttatttgctaaaaaccaggctgttgaatcacatttgggaagggtacttatcttaatgactaatgacttaattgggaaagttgaattcttgtaaaatacaaaatccaaggacttcttggatttaatctgattgtcacttcttagcagatcacttttttgataatgaaagttaagcatactgaatgctacttttgattgacaaactggctataatagtctaggggaaaaatccctaaacagataaagattcctaaagtaatggtggcagctgatgtttcagtgaacttttatcttgatgcgtttaaatggaagtaatgccagacctgagatttttaaggcatttttacagcttgtattgaaatgattggagacatggtttctttattagctattttgagacctgtggagttaagcaagacttttaaaaattggcaccatatacatctagttagttcctttactcttatttttttaaataaaagtagtacacatcatttccagggttgtaaatatatttggggcttgtttttggtatggatttaaaaggaggatattaagtattcattctaattttgttatttttctagttgccagagatggttgcactgaaatagaacagggagttgcatacaaagcctaaatgtgtattggatttcgaaaatactaggttggtgcaattggttttgtaccaacctaacatgtctttaggaaagtaccatcatgtggaaggaaacaacaggtgttaaaaggttcaaaggaatgagaaataggaagttactagaacctaactgatgttgaccttagaggtaagattattcaggtatattagtggacctccagtccaatggtatagcaaattccagggatctcaggtgcatgcaattttactttctaaagtaaacacttagaaaatagattataacccagacgttttggattatactgagacaaatatgtaaataagttttagcaagtctgaacatgtaccagcgagatcttcaggttaactaagaaaagcccagaaacttcattatttactgtgctttgtatggcataactggtaacaaggcagtaaaatgatacatatttgaactggaccatagtaattaaatgatttatcaatatcatttgcaagataattgtcaggttgagttaatagtaagtggcagcttcccagaaatttgggttatttggcctaagctgtgccctgggattacctcttcatcttccttgacttttaagttcaaatttggaggttatgtgaagtgattgaaataaatctttcaggctgaggaagtcggtaatttcaagaatatagtgaaaacaaggttgtaatctaaacatgagaagcttaagtttaggaaatggttagaatataaattgctaaagccatcatgattttggccacagatgaaaatatgaacactggaaatgagcgccatttaaatgagatgctgtatgtaagccaggggtcagcaaagttcagcctgtgacctggtgtgtgtgggggtgtgtgtgtgtgtgtgtgtgtgtgtgtgtgtgtccgtgtccctgagttaagaatggtttttaggcttgtataggattaaaaaaaaaaaaaacccacagaaaaatgtaggcagcccagcataagataccgcctttcacagaaatgtttgctgaccccggaactgtcactctcgggttacaagagtttgtttctttgaaacagtctggctctgtcacccaggctggagtgcagtggcatgatctcaggtcactgcagcctccacctcccgggttcaagcaattctgcctcagcctcctgagtagctgggattacaggtgtgcaccaccacagacagctaattttacaggtgtacaccaccacacccaagaatcacttgaacccgggaggtgggggttgcagtgagccaagatcatagcactgtactccagtctgggtgacacactgtctgaaaaataaaagtttagttctaggtacaaattaagtggtctacccaacaggaagctgtgaaattagaagtaattttaaagcatactttacacctctatataatcaaagtaagggcaagataaaacttgttagtaaaacatgttttattattttttagataggtagcctgcaacataaaatatattttgaaagctgttaaggggtgtataatctgttaaaaaataccatgattagtatttcacatttagtgactcagatccctttgtgtaagtcctttgcgttgtgcaaagaggtttttctatgagatgagaattatgaacacttcatataggtaaattccataggttgagctggggcagaaattaatggctcctggagattgcatctttttttttttttttttgagcttagaattcccatttggacagaatttagcttttgtgctgttgattacttctgtactaaactggtagccaattgttcacttctaaatggaagggaaaaagttacccacacaagttagaaaatgatttaccgaattatttttttgagttagtatgtatatactgttttaaatcagtaatgtttgttccttttgctgcccatttgggagtatgtggcaattcctagtgctcttgtatgacattactcttcttgagacttgtatatgcaagaaagtatatataaaagatgcctggtggtaactttgtatctgagttctgattcattatggacttttagaaatctatttagataattggttcatactaggtgctcaattactctgaccttgtgtggcttaatccttaaatagttgctttaggtgttactgggtggaagcatggaaagtgaagggctaatattaaggatttttatgtattactgagtagggaaagtgggaagtagcttatctttggacagttgtattactttgcactaatcaccttgtttgcagttgtagctgattcagttctagattttaggaccaaaaagatctctaatttaaagaaacagtttttatatacctagaatgaagattctgtttaaagcggttttggttaacttggttcttgacatttgcctaaaattttgttggattgggactaaaatgttctattagccaatgaataacgtccaagtaaatttttgttttattttgggaa

SEQ ID NO: 4579 - DNA, 1621 bp, Homo sapiens
  source 1..1621: mol_type = genomic DNA
gctgaagcaggcgctcttggctcggcgcggcccgctgcaatccgtggaggaacgcgccgccgagccaccatcatgcctgggcacttacaggaaggcttcggctgcgtggtcaccaaccgattcgaccagttatttgacgacgaatcggaccccttcgaggtgctgaaggcagcagagaacaagaaaaaagaagccggcgggggcggcgttgggggccctggggccaagagcgcagctcaggccgcggcccagaccaactccaacgcggcaggcaaacagctgcgcaaggagtcccagaaagaccgcaagaacccgctgccccccagcgttggcgtggttgacaagaaagaggagacgcagccgcccgtggcgcttaagaaagaaggaataagacgagttggaagaagacctgatcaacaacttcagggtgaagggaaaataattgatagaagaccagaaaggcgaccacctcgtgaacgaagattcgaaaagccacttgaagaaaagggtgaaggaggcgaattttcagttgatagaccgattattgaccgacctattcgaggtcgtggtggtcttggaagaggtcgagggggccgtggacgtggaatgggccgaggagatggatttgattctcgtggcaaacgtgaatttgataggcatagtggaagtgatagatctggcctgaagcacgaggacaaacgtggaggtagcggatctcacaactggggaactgtcaaagacgaattaacagagtcccccaaatacattcagaaacaaatatcttataattacagtgacttggatcaatcaaatgtgactgaggaaacacctgaaggtgaagaacatcatccagtggcagacactgaaaataaggagaatgaagttgaagaggtaaaagaggagggtccaaaagagatgactttggatgagtggaaggctattcaaaataaggaccgggcaaaagtagaatttaatatccgaaaaccaaatgaaggtgctgatgggcagtggaagaagggatttgttcttcataaatcaaagagtgaagaggctcatgctgaagattcggttatggaccatcatttccggaagccagcaaatgatataacgtctcagctggagatcaattttggagaccttggccgcccaggacgtggcggcaggggaggacgaggtggacgtgggcgtggtgggcgcccaaaccgtggcagcaggaccgacaagtcaagtgcttctgctcctgatgtggatgacccagaggcattcccagctctggcttaactggatgccataagacaaccctggttcctttgtgaacccttctgttcaaagcttttgcatgcttaaggattccaaacgactaagaaattaaaaaaaaaaagactgtcattcataccattcacacctaaagactgaattttatctgttttaaaaatgaacttctcccgctacacagaagtaacaaatatggtagtcagttttgtatttagaaatgtattggtagcagggatgttttcataattttcagagattatgcattcttcatgaatacttttgtattgctgcttgcaaatatgcatttccaaacttgaaatataggtgtgaacagtgtgtaccagtt

SEQ ID NO: 4580 - DNA, 1077 bp, Homo sapiens
  source 1..1077: mol_type = genomic DNA
ccagcctaggccgaacttccggctctcactgctaggggcttaagcggagggagtcgagccagcgtcgccgcgatggtgttgttggagagcgagcagttcctgacggagctgaccagacttttccagaagtgccggacgtcgggcagcgtctatatcaccttgaagaagtatgacggtcgaaccaaacccattccaaagaagggtactgtggagggctttgagcccgcagacaacaagtgtctgttaagagctaccgatgggaagaagaagatcagcactgtggtgagctccaaggaagtgaataagtttcagatggcttattcaaacctccttagagctaacatggatgggctgaagaagagagacaaaaagaacaaaactaagaagaccaaagcagcagcagcagcagcagcagcagcacctgccgcagcagcaacagcaccaacaacagcagcaacaacagcagcaacagcagcacagtaaagggcatacatttcctgctttcaccaattaaccactgaattgctattttttccttttggccagatagctaggtttctggttcccccacagtaggtgttttcacataagattagggtccttttggaaagaatagttgcagtgtttataggatagttgtggtaagaatctagtttattttgcatttggctaattggtctgtgctgcatggttatatactcctggattatagattaaaagtctctgtagacatctctgtgaagagcaagctatcattaaacatgtctgtttatcagcactgtctctttattcctttcccaacccattttaatagttctggcaataactactaaatctagaatgatgtgattaatgaataggctttagctctataatatcttctaggttattagaattgaaacctgacagttttataaaaagtcatgttatctcatgagctgcttcccacctggctgtataattttatcatcatggttccccagtttcgatgagttctcacagtcaaatgagagtttgtttaaccaccttaggagaaacatactacaaagtcatcaagaataaaggttccaaagtaat

SEQ ID NO: 4581 - DNA, 2751 bp, Homo sapiens
  source 1..2751: mol_type = genomic DNA
gcgccaccagggcagcagccgccgcagccgccgccgctgggcagaggagccggagacgcgagcgggcgaggtggcggcggcggcggagcgggagcgggtaccgggcgcgggcagagcgcggcggcgcgggtgtgttccagagaacaagccttcagacatttgctatattgacgctgagctgtcaggggactcaggcttatgaggaggtattgttacacaaaacagtgtctagtgaagacgacaagaaagaggggaaaggatcggaaaaagaagctaaaatactatagaaaaccatgagatctattcgatcttttgctaatgatgatcgccatgttatggtgaaacattcaacaatctatccatctccggaggaacttgaagctgttcagaatatggtatctactgttgaatgtgctcttaaacatgtctcagattggttggatgaaacaaataaaggcacaaaaacagagggtgagacagaagtgaagaaagatgaggccggagaaaactattccaagtggtcggacattgtgtggtgtaatgaggattggcctggttgcaaaaggcttgctgattaaagatgatatggacttggagctggttttaatgtgcaaagacaaacccacagagaccctgttaaatacagtcaaagataatcttcctattcagattcagaaactcacagaagagaaatatcaagtggaacaatgtgtaaatgaggcatctattataattcggaatacaaaagagcccacgctaactttgaaggtgatacttacctcacctctaattagggacgaattggagaagaaggatggagctttacagttcaccattaactgtagaactataaaatgatttctgaagtgtcaagataaatgttaattctgaaaatgtttcgatgaaagatcctccggacttattggacaggcagaaatgcctgaacgccttggcgtctcttcgacatgccaaatggtttcaggcaagggcaaatggattaaaatcatgtgtaattgtcctccgcattctgcgtgatttgtgcaacagagtccccacatgggcaccattgaaaggatggccactagaacttatatgtgaaaagtctataggtacttgtaatagacctttgggcgctggggaggccttgagacgagtaatggagtgtttggcatctggaatactacttcctgggggtcctggtcttcatgatccttgtgagcgagacccaacagatgctctgagctatatgaccatccagcaaaaagaagatattacccacagtgcacagcatgcactcagactatcagcctttggccagatttacaaagtgctggagatggacccccttccatctagtaagccttttcagaagtattcctggtcagttactgataaagaaggtgctgggtcttcagctctaaagaggccatttgaagatggattaggggatgataaagaccccaacaagaagatgaaacgaaacttaaggaaaattctggatagtaaagcaatagaccttatgaatgcactaatgaggctaaatcagatcaggcctgggcttcagtataagctcctatctcagtctggccccgttcatgccccagtcttcacaatgtctgtagatgtggatggcacaacatatgaagcctcaggaccatccaagaaaacagcaaaacttcacgtagcggtgaaggtattgcaggcaatgggatatccaacaggctttgatgcagatattgaatgtatgagttccgatgaaaaatcagataatgaaagtaaaaatgaaacagtgtcttcaaactcaagcaataatactggaaattctacaactgaaacctccagtaccttagaggtaagaactcagggccctatcctcacagcaagtggcaaaaaccctgtaatggagctcaatgaaaaaagaagaggtctcaagtatgaactcatctcagagactggtggaagccatgacaagcgctttgtaatggaggtagaagtagatggacagaaattcagaggcgcaggtccaaataagaaagtggcaaaggcgagtgcagctttagctgccttggagaaactgttttctggacccaatgcggcaaataataagaaaaagaagattatccctcaggcaaagggcgttgtgaatacagctgtgtctgcagcagtccaagctgttcggggcagaggaagaggaactctaacaaggggagcttttgttggggcgacagctgctcctggctacatagctccaggctatggaacaccatatggttacagcacagctgcccctgcctatggtttacccaagagaatggttctgttacccgttatgaaatttccaacatatcctgttccccactactcattcttttagcaaatgacagaagctaattcctattgaacaacaatacagtacaacacagaatgttagagaaaaagcctttttatcctgctttctttgaacacatacttgatcaaaattatttgtaaagaacatctttcctactttttgattttaacaaatgcaaatttagttctctaaaacttgaaaaaaaaaaaagaaaccagttctgtgaaaacggtacctcatttctggaaaataacttataccagcccttctgttctagggaaataaaagtctagcagttcaaagtttaagttttaagagacgtatcagattatgtaaaattaaatttgtgaaggatgtatagagtctcaaacactgatcacaaataaactgctttgttgtaa

SEQ ID NO: 4582 - DNA, 3335 bp, Homo sapiens
  source 1..3335: mol_type = genomic DNA
gcgccaccagggcagcagccgccgcagccgccgccgctgggcagaggagccggagacgcgagcgggcgaggtggcggcggcggcggagcgggagcgggtaccgggcgcgggcagagcgcggcggcgcggagacggggttttgccatgttgacctggctggtctcgaactcctgaacgcaagtgatccgcctgcctcagcctcccaaggtgctgggattacaggcacgagccactgtgcctggcctcaactgttgcttcttataaaggtgtgttccagagaacaagccttcagacatttgctatattgacgctgagctgtcaggggactcaggcttatgaggaggtattgttacacaaaacagtgtctagtgaagacgacaagaaagaggggaaaggatcggaaaaagaagctaaaatactatagaaaaccatgagatctattcgatcttttgctaatgatgatcgccatgttatggtgaaacattcaacaatctatccatctccggaggaacttgaagctgttcagaatatggtatctactgttgaatgtgctcttaaacatgtctcagattggttggatgaaacaaataaaggcacaaaaacagagggtgagacagaagtgaagaaagatgaggccggagaaaactattccaaggatcaaggtggtcggacattgtgtggtgtaatgaggattggcctggttgcaaaaggcttgctgattaaagatgatatggacttggagctggttttaatgtgcaaagacaaacccacagagaccctgttaaatacagtcaaagataatcttcctattcagattcagaaactcacagaagagaaatatcaagtggaacaatgtgtaaatgaggcatctattataattcggaatacaaaagagcccacgctaactttgaaggtgatacttacctcacctctaattagggacgaattggagaagaaggatggagaaaatgtttcgatgaaagatcctccggacttattggacaggcagaaatgcctgaacgccttggcgtctcttcgacatgccaaatggtttcaggcaagggcaaatggattaaaatcatgtgtaattgtcctccgcattctgcgtgatttgtgcaacagagtccccacatgggcaccattgaaaggatggccactagaacttatatgtgaaaagtctataggtacttgtaatagacctttgggcgctggggaggccttgagacgagtaatggagtgtttggcatctggaatactacttcctgggggtcctggtcttcatgatccttgtgagcgagacccaacagatgctctgagctatatgaccatccagcaaaaagaagatattacccacagtgcacagcatgcactcagactatcagcctttggccagatttacaaagtgctggagatggacccccttccatctagtaagccttttcagaagtattcctggtcagttactgataaagaaggtgctgggtcttcagctctaaagaggccatttgaagatggattaggggatgataaagaccccaacaagaagatgaaacgaaacttaaggaaaattctggatagtaaagcaatagaccttatgaatgcactaatgaggctaaatcagatcaggcctgggcttcagtataagctcctatctcagtctggccccgttcatgccccagtcttcacaatgtctgtagatgtggatggcacaacatatgaagcctcaggaccatccaagaaaacagcaaaacttcacgtagcggtgaaggtattgcaggcaatgggatatccaacaggctttgatgcagatattgaatgtatgagttccgatgaaaaatcagataatgaaagtaaaaatgaaacagtgtcttcaaactcaagcaataatactggaaattctacaactgaaacctccagtaccttagaggtaagaactcagggccctatcctcacagcaagtggcaaaaaccctgtaatggagctcaatgaaaaaagaagaggtctcaagtatgaactcatctcagagactggtggaagccatgacaagcgctttgtaatggaggtagaagtagatggacagaaattcagaggcgcaggtccaaataagaaagtggcaaaggcgagtgcagctttagctgccttggagaaactgttttctggacccaatgcggcaaataataagaaaaagaagattatccctcaggcaaagggcgttgtgaatacagctgtgtctgcagcagtccaagctgttcggggcagaggaagaggaactctaacaaggggagcttttgttggggcgacagctgctcctggctacatagctccaggctatggaacaccatatggttacagcacagctgcccctgcctatggtttacccaagagaatggttctgttacccgttatgaaatttccaacatatcctgttccccactactcattcttttagcaaatgacagaagctaattcctattgaacaacaatacagtacaacacagaatgttagagaaaaagcctttttatcctgctttctttgaacacatacttgatcaaaattatttgtaaagaacatctttcctactttttgattttaacaaatgcaaatttagttctctaaaacttgaaaaaaaaaaaagaaaccagttctgtgaaaacggtacctcatttctggaaaataacttataccagcccttctgttctagggaaataaaagtctagcagttcaaagtttaagttttaagagacgtatcagattatgtaaaattaaatttgtgaaggatgtatagagtctcaaacactgatcacaaataaactgctttgttgtaacacagagtactgcctggttcctgatgcagtcactgattcttagttgattgatatgtatttgccccagggcactttaatttgggctgtagttattttttttaatacaatagagacttttcatttaactttaactttgtaaatattgaagtgtgtaataaagccaataaaatatgggtttgaatattgttttagcttattatttttgatatgttttggtatcaaattacaaggaattgaaaactaataacttagccctagaagcccattcacttgtaagcaaagtgctaaaacaaagcaaaggtgattgttagtttgagccagtctactcactttgtaagccctttgtactcctgttgtacaagggccatccccatgataaaggttccattctgttatttgagcattgcttattaaaatgatggcactacccagagatggggaaggagaatgtgattatcctagtttatgaatttccaagtttttaaaaataataaattaatcaatcaatc

SEQ ID NO: 4583 - DNA, 832 bp, Homo sapiens
  source 1..832: mol_type = genomic DNA
gctttgtcacgctggctggagtacagtggcgcaatctcggctcactgcaatctccgcctcccaggttcaagcaattctgcctcggcttcctgagtagctgggactacaggtgcgcaccaccatgcctggctaatttttgtatttttagtagcgtcggggtttcaccatgttggccaggctggtctcgaactcctgacctcaggtgatccacccgccttggctcctaaagtgctggaattacaggtatgagccactgtgactggccgcaggtggtctgattctagtcctggctctgtcgcagactagctgcttgatctcaggaaatgtctctatttctagattgtcttcaatgttcttatcctgcttatctgtggataatattcttgatagtcatgtgaaggatctatcttgggaaagccaaggacatctgggaatgtttgacaggtgtgttccagagaacaagccttcagacatttgctatattgacgctgagctgtcaggggactcaggcttatgaggaggtattgttacacaaaacagtgtctagtgaagacgacaagaaagaggggaaaggatcggaaaaagaagctaaaatactatagaaaaccatgagatctattcgatcttttgctaatgatgatcgccatgttatggtgaaacattcaacaatctatccatctccggaggaacttgaagctgttcagaatatggtatctactgttgaatgtgctcttaaacatgtctcagattggttggatgaaacaaataaaggcacaaaaacagagggtgagacagaagtgaagaaagatgaggccggagaaaactattccaa

SEQ ID NO: 4584 - DNA, 6290 bp, Homo sapiens
  source 1..6290: mol_type = genomic DNA
ccggagccgcgagcgccaccagggcagcagccgccgcagccgccgccgctgggcagaggagccggagacgcgagcgggcgaggtggcggcggcggcggagcgggagcgggtaccgggcgcgggcagagcgcggcggcgcgggtgtgttccagagaacaagccttcagacatttgctatattgacgctgagctgtcaggggactcaggcttatgaggaggtattgttacacaaaacagtgtctagtgaagacgacaagaaagaggggaaaggatcggaaaaagaagctaaaatactatagaaaaccatgagatctattcgatcttttgctaatgatgatcgccatgttatggtgaaacattcaacaatctatccatctccggaggaacttgaagctgttcagaatatggtatctactgttgaatgtgctcttaaacatgtctcagattggttggatgaaacaaataaaggcacaaaaacagagggtgagacagaagtgaagaaagatgaggccggagaaaactattccaaggatcaaggtggtcggacattgtgtggtgtaatgaggattggcctggttgcaaaaggcttgctgattaaagatgatatggacttggagctggttttaatgtgcaaagacaaacccacagagaccctgttaaatacagtcaaagataatcttcctattcagattcagaaactcacagaagagaaatatcaagtggaacaatgtgtaaatgaggcatctattataattcggaatacaaaagagcccacgctaactttgaaggtgatacttacctcacctctaattagggacgaattggagaagaaggatggagaaaatgtttcgatgaaagatcctccggacttattggacaggcagaaatgcctgaacgccttggcgtctcttcgacatgccaaatggtttcaggcaagggcaaatggattaaaatcatgtgtaattgtcctccgcattctgcgtgatttgtgcaacagagtccccacatgggcaccattgaaaggatggccactagaacttatatgtgaaaagtctataggtacttgtaatagacctttgggcgctggggaggccttgagacgagtaatggagtgtttggcatctggaatactacttcctgggggtcctggtcttcatgatccttgtgagcgagacccaacagatgctctgagctatatgaccatccagcaaaaagaagatattacccacagtgcacagcatgcactcagactatcagcctttggccagatttacaaagtgctggagatggacccccttccatctagtaagccttttcagaagtattcctggtcagttactgataaagaaggtgctgggtcttcagctctaaagaggccatttgaagatggattaggggatgataaagaccccaacaagaagatgaaacgaaacttaaggaaaattctggatagtaaagcaatagaccttatgaatgcactaatgaggctaaatcagatcaggcctgggcttcagtataagctcctatctcagtctggccccgttcatgccccagtcttcacaatgtctgtagatgtggatggcacaacatatgaagcctcaggaccatccaagaaaacagcaaaacttcacgtagcggtgaaggtattgcaggcaatgggatatccaacaggctttgatgcagatattgaatgtatgagttccgatgaaaaatcagataatgaaagtaaaaatgaaacagtgtcttcaaactcaagcaataatactggaaattctacaactgaaacctccagtaccttagaggtaagaactcagggccctatcctcacagcaagtggcaaaaaccctgtaatggagctcaatgaaaaaagaagaggtctcaagtatgaactcatctcagagactggtggaagccatgacaagcgctttgtaatggaggtagaagtagatggacagaaattcagaggcgcaggtccaaataagaaagtggcaaaggcgagtgcagctttagctgccttggagaaactgttttctggacccaatgcggcaaataataagaaaaagaagattatccctcaggcaaagggcgttgtgaatacagctgtgtctgcagcagtccaagctgttcggggcagaggaagaggaactctaacaaggggagcttttgttggggcgacagctgctcctggctacatagctccaggctatggaacaccatatggttacagcacagctgcccctgcctatggtttacccaagagaatggttctgttacccgttatgaaatttccaacatatcctgttccccactactcattcttttagcaaatgacagaagctaattcctattgaacaacaatacagtacaacacagaatgttagagaaaaagcctttttatcctgctttctttgaacacatacttgatcaaaattatttgtaaagaacatctttcctactttttgattttaacaaatgcaaatttagttctctaaaacttgaaaaaaaaaaaagaaaccagttctgtgaaaacggtacctcatttctggaaaataacttataccagcccttctgttctagggaaataaaagtctagcagttcaaagtttaagttttaagagacgtatcagattatgtaaaattaaatttgtgaaggatgtatagagtctcaaacactgatcacaaataaactgctttgttgtaacacagagtactgcctggttcctgatgcagtcactgattcttagttgattgatatgtatttgccccagggcactttaatttgggctgtagttattttttttaatacaatagagacttttcatttaactttaactttgtaaatattgaagtgtgtaataaagccaataaaatatgggtttgaatattgttttagcttattatttttgatatgttttggtatcaaattacaaggaattgaaaactaataacttagccctagaagcccattcacttgtaagcaaagtgctaaaacaaagcaaaggtgattgttagtttgagccagtctactcactttgtaagccctttgtactcctgttgtacaagggccatccccatgataaaggttccattctgttatttgagcattgcttattaaaatgatggcactacccagagatggggaaggagaatgtgattatcctagtttatgaatttccaagtttttaaaaataataaattaatcaatcaatcaccctctcttgttcttgtggccttcttcactctgtaagatattgtgttcactccctggcttttttcatgcagatagaagattagtgattttgctgggattcattgaagggtctcctttcctcttcaattacatcagaatctaaagcagcaacagggtccccataaaaacttgctcttcgattgtcccagttcttgttgagtgctgctgtgaaaagtgacaggtttcagccatgggtcagcatttctttttaagacacctgatgatgctggtggaaatggatcagtgggtaacattgtgctgttctgtaaagggtgcagacctaagtcctccacttgcattctcaccttgtttggaaagccaatgatgttactaggtcaatggtttcattaaggtactcacccccatgaaggagcagcagtgtggtcccctgtcaatatttataaggcaccatgtcttaaaaatgtctgtttttagtatgaattagctttcattttccctattcagttctgcttttgggaacttgacagggcccatccatgagaatgggcttcacaaaatatggcaaatgtatgtaccaaattccttcgggaccactaaataaaggtgaaatgggcaatgtacaacaaatgttagtgtcacttctcagatatatattacacaatgattagtttgtttcttctccttggtcttttgtctttattagtggtgggtgatactttaataaaacctcatcacttgctggaaatagctgtaacttatcattctcatcctgtgcattagtggctagacataaacaagagggcccatttcagctgggagttttcatgtttcattgatgcgttttgctgacctatggatgaaacagagccatcactgagaagaaaaagcatggctgatagtgtccagtttttattaattaaatctttacagtagtcctcattgtctttggaatactattaattggcagctgcggctgtattgttatttgaaattggtcatcaaatttggattccacgttggaatctctagatatttctcgttagaaaattcttttgaagtagctgactctgcttcataactcacgcgctctgtaatggtgaaaagggagctgtgctgttttccaacatgatggcagtcatttcaaatggtttctaccaagtcttttttttttttttttaattttgttgtttgttggaagttactaaccatgttgtaaacctgcccagttgctgcaaacttttacatttctctgctttacttaaaataatcgagctgtcagtcctttgttagaagtggtaaccatgcaagttcaactgtttaaattctgtaatgaattaagtgtccccccacctgttgcccttcccacccttccattttgtaatgaaaattccacttacagctgaaagagcagagaaatataaatgaagctcttggcttcaccaaattgcctgagattaacatgaagttttgcttctctgctcttttctccactgtaggtggttttttcattgacagcccctattgccagcctctgagcgtcgcaccatttattattcacttgggccctcaagatttcttctctgacttctagaaccatcaggttgtctggcttgaaatggcaatttctatgtcttggtcttaagagcaatgtgacaccctgaggctatccagctttcagacactccactctgacaccctctttttgaaagcaatgactgatcattttaaagaagagcaatactttgttcaaagccacggtgtctgttttaaaacttttcctttggaaacctagcaatatctgtacttaacccctttttagcatagtttcttgtcagggagtttacaggtcagtgtagagcttaaaattagcgtgtgagctgtgctatgttctgacagttttttacactttttagcacataaatagttacattcctgactgcgtcagttagcgttactataatttctcagagataggggtcctccttgaagccatatcctctgcacggggactggcccctagccagggatgtggcttgcagcttgtgtttcttcaggctgcaggagtaccccatctcttgtgcaaggtaattggtccagtagatttccaacatacctcatgctgactagatgaagtgcatgggtggtgaagtaaggagttgagtttatatagttctgaagtcgtttgtagtctctctcaaattgttagcctggggaacaaaccactgagagattttgctggtattggccttttctttttttttttttttttaattttgggtgaatgtttgaaaatcatgaatcagccaccattattaattgaagagctgggaatacctcgttaatgtatttttaaaactggtgttggaccctctgtgtatttcaggttaatacttttaagcagttttcagcacgtttatctcactttattctcgttctcctcggaccttcgtagccatatcacttgtataaaataggctgagatatagtgactgtaagctgtgatctcagtatacaaaggtaagctcttttattttctgattaaagagaaaaatagtcaattaagacaacatgcatatatgacaatcatatatgatgtatttgatctcttaggtcatatgtcatcgcattacctttaaaaattgtatggtctaaatgtaaaatagttatttttcaacatttgttttaatacccttgtaactgctttttactcaagacagacatttcacttacactaagtgtgtgtgtgtgtgtgtgtgtgtgtagaaacttaggatataacacgtatgtaaattacacacacatacctgtttaaatgtaagaattcagtgataggaacagttcatctaagaagattttaatgacagggcactcttttggccaaagcagtggaatttcctaagcagcaaggttggtaatagtgctggtaggatctgtatgtgtaagctgttacacaagctgaggatcaaagtgccaatttctcaaggagaaaaacttctccgagaaatgaaagtctctgatctgtgttgtatgccctaatacaacaacagcaagaagccatagaaaaaagcaatagaaaatg

SEQ ID NO: 4585 - DNA, 2990 bp, Homo sapiens
  source 1..2990: mol_type = genomic DNA
ccggagccgcgagcgccaccagggcagcagccgccgcagccgccgccgctgggcagaggagccggagacgcgagcgggcgaggtggcggcggcggcggagcgggagcgggtaccgggcgcgggcagagcgcggcggcgcgggtgtgttccagagaacaagccttcagacatttgctatattgacgctgagctgtcaggggactcaggcttatgaggaggtattgttacacaaaacagtgtctagtgaagacgacaagaaagaggggaaaggatcggaaaaagaagctaaaatactatagaaaaccatgataaacaagaacaaaagaggcaagactgttcataaaaaattgagaatgttttagtttgcgatggacttcaaaacaaaatatttaccatgtactaacatataatttcatagatctattcgatcttttgctaatgatgatcgccatgttatggtgaaacattcaacaatctatccatctccggaggaacttgaagctgttcagaatatggtatctactgttgaatgtgctcttaaacatgtctcagattggttggatgaaacaaataaaggcacaaaaacagagggtgagacagaagtgaagaaagatgaggccggagaaaactattccaaggatcaaggtggtcggacattgtgtggtgtaatgaggattggcctggttgcaaaaggcttgctgattaaagatgatatggacttggagctggttttaatgtgcaaagacaaacccacagagaccctgttaaatacagtcaaagataatcttcctattcagattcagaaactcacagaagagaaatatcaagtggaacaatgtgtaaatgaggcatctattataattcggaatacaaaagagcccacgctaactttgaaggtgatacttacctcacctctaattagggacgaattggagaagaaggatggagaaaatgtttcgatgaaagatcctccggacttattggacaggcagaaatgcctgaacgccttggcgtctcttcgacatgccaaatggtttcaggcaagggcaaatggattaaaatcatgtgtaattgtcctccgcattctgcgtgatttgtgcaacagagtccccacatgggcaccattgaaaggatggccactagaacttatatgtgaaaagtctataggtacttgtaatagacctttgggcgctggggaggccttgagacgagtaatggagtgtttggcatctggaatactacttcctgggggtcctggtcttcatgatccttgtgagcgagacccaacagatgctctgagctatatgaccatccagcaaaaagaagatattacccacagtgcacagcatgcactcagactatcagcctttggccagatttacaaagtgctggagatggacccccttccatctagtaagccttttcagaagtattcctggtcagttactgataaagaaggtgctgggtcttcagctctaaagaggccatttgaagatggattaggggatgataaagaccccaacaagaagatgaaacgaaacttaaggaaaattctggatagtaaagcaatagaccttatgaatgcactaatgaggctaaatcagatcaggcctgggcttcagtataagctcctatctcagtctggccccgttcatgccccagtcttcacaatgtctgtagatgtggatggcacaacatatgaagcctcaggaccatccaagaaaacagcaaaacttcacgtagcggtgaaggtattgcaggcaatgggatatccaacaggctttgatgcagatattgaatgtatgagttccgatgaaaaatcagataatgaaagtaaaaatgaaacagtgtcttcaaactcaagcaataatactggaaattctacaactgaaacctccagtaccttagaggtaagaactcagggccctatcctcacagcaagtggcaaaaaccctgtaatggagctcaatgaaaaaagaagaggtctcaagtatgaactcatctcagagactggtggaagccatgacaagcgctttgtaatggaggtagaagtagatggacagaaattcagaggcgcaggtccaaataagaaagtggcaaaggcgagtgcagctttagctgccttggagaaactgttttctggacccaatgcggcaaataataagaaaaagaagattatccctcaggcaaagggcgttgtgaatacagctgtgtctgcagcagtccaagctgttcggggcagaggaagaggaactctaacaaggggagcttttgttggggcgacagctgctcctggctacatagctccaggctatggaacaccatatggttacagcacagctgcccctgcctatggtttacccaagagaatggttctgttacccgttatgaaatttccaacatatcctgttccccactactcattcttttagcaaatgacagaagctaattcctattgaacaacaatacagtacaacacagaatgttagagaaaaagcctttttatcctgctttctttgaacacatacttgatcaaaattatttgtaaagaacatctttcctactttttgattttaacaaatgcaaatttagttctctaaaacttgaaaaaaaaaaaagaaaccagttctgtgaaaacggtacctcatttctggaaaataacttataccagcccttctgttctagggaaataaaagtctagcagttcaaagtttaagttttaagagacgtatcagattatgtaaaattaaatttgtgaaggatgtatagagtctcaaacactgatcacaaataaactgctttgttgtaacacagagtactgcctggttcctgatgcagtcactgattcttagttgattgatatgtatttgccccagggcactttaatttgggctgtagttattttttttaatacaatagagacttttcatttaactttaactttgtaaatattgaagtgtgtaataaagccaataaaatatgggtttgaa

SEQ ID NO: 4586 - DNA, 408 bp, Homo sapiens
  source 1..408: mol_type = genomic DNA
ggggccgcgacctcggctcgagaaggtgctttagtctgaagatggcggcctcagcagcgagaggtgctgcggcgctgcgtagaagtatcaatcagccggttgcttttgtgagaagaattccttggactgcggcgtcgagtcagctgaaagaacactttgcacagttcggccatgtcagaaggtgcattttaccttttgacaaggagactggctttcacagaggtttgggttgggttcagttttcttcagaagaaggacttcggaatgcactacaacaggaaaatcatattatagatggagtaaaggtccaggttcacactagaaggccaaaacttccgcaaacatctgatgatgaaaagaaagatttttgagactgcagcctattaataaagttaacataactgagaa

SEQ ID NO: 4587 - DNA, 3500 bp, Homo sapiens
  source 1..3500: mol_type = genomic DNA
acttcctgccgggctgcgggcgcctgagcggctcttcagcgtttgcgccggcggctgccgcgtctctctcggctcccgcttcctttgaccgcctcccccccccggcccggcggcgcccgcctcctccacggccactccgcctcttccctcccttcgtcccttcttcctctcccttttttccttcttccttcccctcctcgccgccaccgcccaggaccgccggccgggggacgagctcggagcagcagccagagtttattaaccacttaacctctcagaactgaacaaagacaacattgttcctggaacgccctctttttaaaaaaggtagaactttagacttcatagcactgaattaacctgcactgaaagctgtttacctgcatttgttcacttttgttgaaagtgaccatgtctcaagttcaagtgcaagttcagaacccatctgctgctctctcagggagccaaatactgaacaagaaccagtctcttctctcacagcctttgatgagtattccttctactactagctctctgccctctgaaaatgcaggtagacccattcaaaactctgctttaccctctgcatctattacatccaccagtgcagctgcagaaagcataacccctactgtagaactaaatgcactgtgcatgaaacttggaaaaaaaccaatgtataagcctgttgacccttactctcggatgcagtccacctataactacaacatgagaggaggtgcttatcccccgaggtacttttacccatttccagttccacctttactttatcaagtggaactttctgtgggaggacagcaatttaatggcaaaggaaagacaagacaggctgcgaaacacgatgctgctgccaaagcgttgaggatcctgcagaatgagcccctgccagagaggctggaggtgaatggaagagaatccgaagaagaaaatctcaataaatctgaaataagtcaagtgtttgagattgcacttaaacggaacttgcctgtgaatttcgaggtggcccgggagagtggcccaccccacatgaagaactttgtgaccaaggtttcggttggggagtttgtgggggaaggtgaagggaaaagcaagaagatttcaaagaaaaatgccgccatagctgttcttgaggagctgaagaagttaccgcccctgcctgcagttgaacgagtaaagcctagaatcaaaaagaaaacaaaacccatagtcaagccacagacaagcccagaatatggccaggggatcaatccgattagccgactggcccagatccagcaggcaaaaaaggagaaggagccagagtacacgctcctcacagagcgaggcctcccgcgccgcagggagtttgtgatgcaggtgaaggttggaaaccacactgcagaaggaacgggcaccaacaagaaggtggccaagcgcaatgcagccgagaacatgctggagatccttggtttcaaagtcccgcaggcgcagcccaccaaacccgcactcaagtcagaggagaagacacccataaagaaaccaggggatggaagaaaagtaaccttttttgaacctggctctggggatgaaaatgggactagtaataaagaggatgagttcaggatgccttatctaagtcatcagcagctgcctgctggaattcttcccatggtgcccgaggtcgcccaggctgtaggagttagtcaaggacatcacaccaaagattttaccagggcagctccgaatcctgccaaggccacggtaactgccatgatagcccgagagttgttgtatgggggcacctcgcccacagccgagaccattttaaagaataacatctcttcaggccacgtaccccatggacctctcacgagaccctctgagcaactggactatctttccagagtccagggattccaggttgaatacaaagacttccccaaaaacaacaagaacgaatttgtatctcttatcaattgctcctctcagccacctctgatcagccatggtatcggcaaggatgtggagtcctgccatgatatggctgcgctgaacatcttaaagttgctgtctgagttggaccaacaaagtacagagatgccaagaacaggaaacggaccaatgtctgtgtgtgggaggtgctgaaccttttctggccatgaaccattataaaatcccaacatatatactgaaaatactgaaactgctttgaaaatttggaatttctgatacctccagtgggccgagagacacggtgggtaaaggatgtgggcagcagcagggaagacaacagaaacacaaggaggcggctgtggccgggctggactgtgctggggtttgttgtgatggccactcggtgacctggcggtccctacgcaatagcagctgcctgtggggaagaagggctgcccagccagctggttctcccgggacaccagcagatccacaccctgggcacctccgtgtttggtcttttttttcccctgtgtgaaagaagaaacggcacgaccccttctcaagctggctcactcagacacattgggacaaaccctggacagccatgccagagagaggcctttgaccggccccagagctaaaagcaccagagaaaatcaaatgcttcctactcagcgtgacccaacttttctagtgtgccacggccccaccacctcctgcagtacccacaccatcaccactgctttctcttccaacagtgatctgtattcttagtttcattattttcttttgattgatatgacactatataaaattttcatttgagaatttctcaattgtatctagttaaatagcacagtttggaaacttgtctgagactgactttatcaataatctaaccgacaaagatcatatccatgtgtatgtggttagacatttttatttcattgactaacccaggacagtttcagtgatgcaaattgtgtgccctctggttcagctgaaacagtcctggactttcaaaaaccttgaataagtctcccacagttgtataaattggacaatttaggaattttaaactttagatgatcatttggttccatttttatttcatttttatttttgttaatgcaaacaggacttaaatgaactttgatctctgttttaaagattattaaaaaacattgtgtatctatacatatggctcttgaggacttagctttcactacactacaggatatgatctccatgtagtccatataaacctgcagagtgattttccagagtgctcgatactgttaattacatctccattagggctgaaaagaatgacctacgtttctgtatacagctgtgttgcttttgatgttgtgttactgtacacagaagtgtgtgcactgaggctctgcgtgtggtccgtatggaaagcctggtagccctgcgagttaagtactgcttccattcattgtttacgctggaatttttctccccatggaatgtaagtaaaacttaagtgtttgtcatcaataaatggtaatactaaa

SEQ ID NO: 4588 - DNA, 3211 bp, Homo sapiens
  source 1..3211: mol_type = genomic DNA
acttcctgccgggctgcgggcgcctgagcggctcttcagcgtttgcgccggcggctgccgcgtctctctcggctcccgcttcctttgaccgcctcccccccccggcccggcggcgcccgcctcctccacggccactccgcctcttccctcccttcgtcccttcttcctctcccttttttccttcttccttcccctcctcgccgccaccgcccaggaccgccggccgggggacgagctcggagcagcagccagagtttattaaccacttaacctctcagaactgaacaaagacaacattgttcctggaacgccctctttttaaaaaagaaagcataacccctactgtagaactaaatgcactgtgcatgaaacttggaaaaaaaccaatgtataagcctgttgacccttactctcggatgcagtccacctataactacaacatgagaggaggtgcttatcccccgaggtacttttacccatttccagttccacctttactttatcaagtggaactttctgtgggaggacagcaatttaatggcaaaggaaagacaagacaggctgcgaaacacgatgctgctgccaaagcgttgaggatcctgcagaatgagcccctgccagagaggctggaggtgaatggaagagaatccgaagaagaaaatctcaataaatctgaaataagtcaagtgtttgagattgcacttaaacggaacttgcctgtgaatttcgaggtggcccgggagagtggcccaccccacatgaagaactttgtgaccaaggtttcggttggggagtttgtgggggaaggtgaagggaaaagcaagaagatttcaaagaaaaatgccgccatagctgttcttgaggagctgaagaagttaccgcccctgcctgcagttgaacgagtaaagcctagaatcaaaaagaaaacaaaacccatagtcaagccacagacaagcccagaatatggccaggggatcaatccgattagccgactggcccagatccagcaggcaaaaaaggagaaggagccagagtacacgctcctcacagagcgaggcctcccgcgccgcagggagtttgtgatgcaggtgaaggttggaaaccacactgcagaaggaacgggcaccaacaagaaggtggccaagcgcaatgcagccgagaacatgctggagatccttggtttcaaagtcccgcaggcgcagcccaccaaacccgcactcaagtcagaggagaagacacccataaagaaaccaggggatggaagaaaagtaaccttttttgaacctggctctggggatgaaaatgggactagtaataaagaggatgagttcaggatgccttatctaagtcatcagcagctgcctgctggaattcttcccatggtgcccgaggtcgcccaggctgtaggagttagtcaaggacatcacaccaaagattttaccagggcagctccgaatcctgccaaggccacggtaactgccatgatagcccgagagttgttgtatgggggcacctcgcccacagccgagaccattttaaagaataacatctcttcaggccacgtaccccatggacctctcacgagaccctctgagcaactggactatctttccagagtccagggattccaggttgaatacaaagacttccccaaaaacaacaagaacgaatttgtatctcttatcaattgctcctctcagccacctctgatcagccatggtatcggcaaggatgtggagtcctgccatgatatggctgcgctgaacatcttaaagttgctgtctgagttggaccaacaaagtacagagatgccaagaacaggaaacggaccaatgtctgtgtgtgggaggtgctgaaccttttctggccatgaaccattataaaatcccaacatatatactgaaaatactgaaactgctttgaaaatttggaatttctgatacctccagtgggccgagagacacggtgggtaaaggatgtgggcagcagcagggaagacaacagaaacacaaggaggcggctgtggccgggctggactgtgctggggtttgttgtgatggccactcggtgacctggcggtccctacgcaatagcagctgcctgtggggaagaagggctgcccagccagctggttctcccgggacaccagcagatccacaccctgggcacctccgtgtttggtcttttttttcccctgtgtgaaagaagaaacggcacgaccccttctcaagctggctcactcagacacattgggacaaaccctggacagccatgccagagagaggcctttgaccggccccagagctaaaagcaccagagaaaatcaaatgcttcctactcagcgtgacccaacttttctagtgtgccacggccccaccacctcctgcagtacccacaccatcaccactgctttctcttccaacagtgatctgtattcttagtttcattattttcttttgattgatatgacactatataaaattttcatttgagaatttctcaattgtatctagttaaatagcacagtttggaaacttgtctgagactgactttatcaataatctaaccgacaaagatcatatccatgtgtatgtggttagacatttttatttcattgactaacccaggacagtttcagtgatgcaaattgtgtgccctctggttcagctgaaacagtcctggactttcaaaaaccttgaataagtctcccacagttgtataaattggacaatttaggaattttaaactttagatgatcatttggttccatttttatttcatttttatttttgttaatgcaaacaggacttaaatgaactttgatctctgttttaaagattattaaaaaacattgtgtatctatacatatggctcttgaggacttagctttcactacactacaggatatgatctccatgtagtccatataaacctgcagagtgattttccagagtgctcgatactgttaattacatctccattagggctgaaaagaatgacctacgtttctgtatacagctgtgttgcttttgatgttgtgttactgtacacagaagtgtgtgcactgaggctctgcgtgtggtccgtatggaaagcctggtagccctgcgagttaagtactgcttccattcattgtttacgctggaatttttctccccatggaatgtaagtaaaacttaagtgtttgtcatcaataaatggtaatactaaa

SEQ ID NO: 4589 - DNA, 3534 bp, Homo sapiens
  source 1..3534: mol_type = genomic DNA
acttcctgccgggctgcgggcgcctgagcggctcttcagcgtttgcgccggcggctgccgcgtctctctcggctcccgcttcctttgaccgcctcccccccccggcccggcggcgcccgcctcctccacggccactccgcctcttccctcccttcgtcccttcttcctctcccttttttccttcttccttcccctcctcgccgccaccgcccaggaccgccggccgggggacgagctcggagcagcagccaggtggagttttgctcttgtcgcccaggctggagtgcagtggcgtgatctcggctcactgcaacctccacctcccaggttcaagcgattttcccacttcagcctcccgataagctgagattacagagtttattaaccacttaacctctcagaactgaacaaagacaacattgttcctggaacgccctctttttaaaaaagaaagcataacccctactgtagaactaaatgcactgtgcatgaaacttggaaaaaaaccaatgtataagcctgttgacccttactctcggatgcagtccacctataactacaacatgagaggaggtgcttatcccccgaggtacttttacccatttccagttccacctttactttatcaagtggaactttctgtgggaggacagcaatttaatggcaaaggaaagacaagacaggctgcgaaacacgatgctgctgccaaagcgttgaggatcctgcagaatgagcccctgccagagaggctggaggtgaatggaagagaatccgaagaagaaaatctcaataaatctgaaataagtcaagtgtttgagattgcacttaaacggaacttgcctgtgaatttcgagtctttccctctgaaacaggtggcccgggagagtggcccaccccacatgaagaactttgtgaccaaggtttcggttggggagtttgtgggggaaggtgaagggaaaagcaagaagatttcaaagaaaaatgccgccatagctgttcttgaggagctgaagaagttaccgcccctgcctgcagttgaacgagtaaagcctagaatcaaaaagaaaacaaaacccatagtcaagccacagacaagcccagaatatggccaggggatcaatccgattagccgactggcccagatccagcaggcaaaaaaggagaaggagccagagtacacgctcctcacagagcgaggcctcccgcgccgcagggagtttgtgatgcaggtgaaggttggaaaccacactgcagaaggaacgggcaccaacaagaaggtggccaagcgcaatgcagccgagaacatgctggagatccttggtttcaaagtcccgcaggcgcagcccaccaaacccgcactcaagtcagaggagaagacacccataaagaaaccaggggatggaagaaaagtaaccttttttgaacctggctctggggatgaaaatgggactagtaataaagaggatgagttcaggatgccttatctaagtcatcagcagctgcctgctggaattcttcccatggtgcccgaggtcgcccaggctgtaggagttagtcaaggacatcacaccaaagattttaccagggcagctccgaatcctgccaaggccacggtaactgccatgatagcccgagagttgttgtatgggggcacctcgcccacagccgagaccattttaaagaataacatctcttcaggccacgtaccccatggacctctcacgagaccctctgagcaactggactatctttccagagtccagggattccaggttgaatacaaagacttccccaaaaacaacaagaacgaatttgtatctcttatcaattgctcctctcagccacctctgatcagccatggtatcggcaaggatgtggagtcctgccatgatatggctgcgctgaacatcttaaagttgctgtctgagttggaccaacaaagtacagagatgccaagaacaggaaacggaccaatgtctgtgtgtgggaggtgctgaaccttttctggccatgaaccattataaaatcccaacatatatactgaaaatactgaaactgctttgaaaatttggaatttctgatacctccagtgggccgagagacacggtgggtaaaggatgtgggcagcagcagggaagacaacagaaacacaaggaggcggctgtggccgggctggactgtgctggggtttgttgtgatggccactcggtgacctggcggtccctacgcaatagcagctgcctgtggggaagaagggctgcccagccagctggttctcccgggacaccagcagatccacaccctgggcacctccgtgtttggtcttttttttcccctgtgtgaaagaagaaacggcacgaccccttctcaagctggctcactcagacacattgggacaaaccctggacagccatgccagagagaggcctttgaccggccccagagctaaaagcaccagagaaaatcaaatgcttcctactcagcgtgacccaacttttctagtgtgccacggccccaccacctcctgcagtacccacaccatcaccactgctttctcttccaacagtgatctgtattcttagtttcattattttcttttgattgatatgacactatataaaattttcatttgagaatttctcaattgtatctagttaaatagcacagtttggaaacttgtctgagactgactttatcaataatctaaccgacaaagatcatatccatgtgtatgtggttagacatttttatttcattgactaacccaggacagtttcagtgatgcaaattgtgtgccctctggttcagctgaaacagtcctggactttcaaaaaccttgaataagtctcccacagttgtataaattggacaatttaggaattttaaactttagatgatcatttggttccatttttatttcatttttatttttgttaatgcaaacaggacttaaatgaactttgatctctgttttaaagattattaaaaaacattgtgtatctatacatatggctcttgaggacttagctttcactacactacaggatatgatctccatgtagtccatataaacctgcagagtgattttccagagtgctcgatactgttaattacatctccattagggctgaaaagaatgacctacgtttctgtatacagctgtgttgcttttgatgttgtgttactgtacacagaagtgtgtgcactgaggctctgcgtgtggtccgtatggaaagcctggtagccctgcgagttaagtactgcttccattcattgtttacgctggaatttttctccccatggaatgtaagtaaaacttaagtgtttgtcatcaataaatggtaatactaaatttttttgttaatttattctcaaatgccactactgctaggttggtcccctcccaacttgcccctatcctttttttatttttaagaaaaaaactttgtaatgcttgtgattccatctgggcaaaagtctgaagatctgaaataactttatatcaaaccattgatcaataaacagctactaatg

SEQ ID NO: 4590 - DNA, 3332 bp, Homo sapiens
  source 1..3332: mol_type = genomic DNA
acttcctgccgggctgcgggcgcctgagcggctcttcagcgtttgcgccggcggctgccgcgtctctctcggctcccgcttcctttgaccgcctcccccccccggcccggcggcgcccgcctcctccacggccactccgcctcttccctcccttcgtcccttcttcctctcccttttttccttcttccttcccctcctcgccgccaccgcccaggaccgccggccgggggacgagctcggagcagcagccagacggagtctcgctcttttgccaggctggagtgcagtggcgcgatcctgagtcactgcaacctccacctcccaggttcaagcgattctcctgcttcagcctgccaagtagctgggactacagagtttattaaccacttaacctctcagaactgaacaaagacaacattgttcctggaacgccctctttttaaaaaagaaagcataacccctactgtagaactaaatgcactgtgcatgaaacttggaaaaaaaccaatgtataagcctgttgacccttactctcggatgcagtccacctataactacaacatgagaggaggtgcttatcccccgaggtacttttacccatttccagttccacctttactttatcaagtggaactttctgtgggaggacagcaatttaatggcaaaggaaagacaagacaggctgcgaaacacgatgctgctgccaaagcgttgaggatcctgcagaatgagcccctgccagagaggctggaggtgaatggaagagaatccgaagaagaaaatctcaataaatctgaaataagtcaagtgtttgagattgcacttaaacggaacttgcctgtgaatttcgaggtggcccgggagagtggcccaccccacatgaagaactttgtgaccaaggtttcggttggggagtttgtgggggaaggtgaagggaaaagcaagaagatttcaaagaaaaatgccgccatagctgttcttgaggagctgaagaagttaccgcccctgcctgcagttgaacgagtaaagcctagaatcaaaaagaaaacaaaacccatagtcaagccacagacaagcccagaatatggccaggggatcaatccgattagccgactggcccagatccagcaggcaaaaaaggagaaggagccagagtacacgctcctcacagagcgaggcctcccgcgccgcagggagtttgtgatgcaggtgaaggttggaaaccacactgcagaaggaacgggcaccaacaagaaggtggccaagcgcaatgcagccgagaacatgctggagatccttggtttcaaagtcccgcaggcgcagcccaccaaacccgcactcaagtcagaggagaagacacccataaagaaaccaggggatggaagaaaagtaaccttttttgaacctggctctggggatgaaaatgggactagtaataaagaggatgagttcaggatgccttatctaagtcatcagcagctgcctgctggaattcttcccatggtgcccgaggtcgcccaggctgtaggagttagtcaaggacatcacaccaaagattttaccagggcagctccgaatcctgccaaggccacggtaactgccatgatagcccgagagttgttgtatgggggcacctcgcccacagccgagaccattttaaagaataacatctcttcaggccacgtaccccatggacctctcacgagaccctctgagcaactggactatctttccagagtccagggattccaggttgaatacaaagacttccccaaaaacaacaagaacgaatttgtatctcttatcaattgctcctctcagccacctctgatcagccatggtatcggcaaggatgtggagtcctgccatgatatggctgcgctgaacatcttaaagttgctgtctgagttggaccaacaaagtacagagatgccaagaacaggaaacggaccaatgtctgtgtgtgggaggtgctgaaccttttctggccatgaaccattataaaatcccaacatatatactgaaaatactgaaactgctttgaaaatttggaatttctgatacctccagtgggccgagagacacggtgggtaaaggatgtgggcagcagcagggaagacaacagaaacacaaggaggcggctgtggccgggctggactgtgctggggtttgttgtgatggccactcggtgacctggcggtccctacgcaatagcagctgcctgtggggaagaagggctgcccagccagctggttctcccgggacaccagcagatccacaccctgggcacctccgtgtttggtcttttttttcccctgtgtgaaagaagaaacggcacgaccccttctcaagctggctcactcagacacattgggacaaaccctggacagccatgccagagagaggcctttgaccggccccagagctaaaagcaccagagaaaatcaaatgcttcctactcagcgtgacccaacttttctagtgtgccacggccccaccacctcctgcagtacccacaccatcaccactgctttctcttccaacagtgatctgtattcttagtttcattattttcttttgattgatatgacactatataaaattttcatttgagaatttctcaattgtatctagttaaatagcacagtttggaaacttgtctgagactgactttatcaataatctaaccgacaaagatcatatccatgtgtatgtggttagacatttttatttcattgactaacccaggacagtttcagtgatgcaaattgtgtgccctctggttcagctgaaacagtcctggactttcaaaaaccttgaataagtctcccacagttgtataaattggacaatttaggaattttaaactttagatgatcatttggttccatttttatttcatttttatttttgttaatgcaaacaggacttaaatgaactttgatctctgttttaaagattattaaaaaacattgtgtatctatacatatggctcttgaggacttagctttcactacactacaggatatgatctccatgtagtccatataaacctgcagagtgattttccagagtgctcgatactgttaattacatctccattagggctgaaaagaatgacctacgtttctgtatacagctgtgttgcttttgatgttgtgttactgtacacagaagtgtgtgcactgaggctctgcgtgtggtccgtatggaaagcctggtagccctgcgagttaagtactgcttccattcattgtttacgctggaatttttctccccatggaatgtaagtaaaacttaagtgtttgtcatcaataaatggtaatactaaa

SEQ ID NO: 4591 - DNA, 3154 bp, Homo sapiens
  source 1..3154: mol_type = genomic DNA
acttcctgccgggctgcgggcgcctgagcggctcttcagcgtttgcgccggcggctgccgcgtctctctcggctcccgcttcctttgaccgcctcccccccccggcccggcggcgcccgcctcctccacggccactccgcctcttccctcccttcgtcccttcttcctctcccttttttccttcttccttcccctcctcgccgccaccgcccaggaccgccggccgggggacgagctcggagcagcagccagaaagcataacccctactgtagaactaaatgcactgtgcatgaaacttggaaaaaaaccaatgtataagcctgttgacccttactctcggatgcagtccacctataactacaacatgagaggaggtgcttatcccccgaggtacttttacccatttccagttccacctttactttatcaagtggaactttctgtgggaggacagcaatttaatggcaaaggaaagacaagacaggctgcgaaacacgatgctgctgccaaagcgttgaggatcctgcagaatgagcccctgccagagaggctggaggtgaatggaagagaatccgaagaagaaaatctcaataaatctgaaataagtcaagtgtttgagattgcacttaaacggaacttgcctgtgaatttcgagtctttccctctgaaacaggtggcccgggagagtggcccaccccacatgaagaactttgtgaccaaggtttcggttggggagtttgtgggggaaggtgaagggaaaagcaagaagatttcaaagaaaaatgccgccatagctgttcttgaggagctgaagaagttaccgcccctgcctgcagttgaacgagtaaagcctagaatcaaaaagaaaacaaaacccatagtcaagccacagacaagcccagaatatggccaggggatcaatccgattagccgactggcccagatccagcaggcaaaaaaggagaaggagccagagtacacgctcctcacagagcgaggcctcccgcgccgcagggagtttgtgatgcaggtgaaggttggaaaccacactgcagaaggaacgggcaccaacaagaaggtggccaagcgcaatgcagccgagaacatgctggagatccttggtttcaaagtcccgcaggcgcagcccaccaaacccgcactcaagtcagaggagaagacacccataaagaaaccaggggatggaagaaaagtaaccttttttgaacctggctctggggatgaaaatgggactagtaataaagaggatgagttcaggatgccttatctaagtcatcagcagctgcctgctggaattcttcccatggtgcccgaggtcgcccaggctgtaggagttagtcaaggacatcacaccaaagattttaccagggcagctccgaatcctgccaaggccacggtaactgccatgatagcccgagagttgttgtatgggggcacctcgcccacagccgagaccattttaaagaataacatctcttcaggccacgtaccccatggacctctcacgagaccctctgagcaactggactatctttccagagtccagggattccaggttgaatacaaagacttccccaaaaacaacaagaacgaatttgtatctcttatcaattgctcctctcagccacctctgatcagccatggtatcggcaaggatgtggagtcctgccatgatatggctgcgctgaacatcttaaagttgctgtctgagttggaccaacaaagtacagagatgccaagaacaggaaacggaccaatgtctgtgtgtgggaggtgctgaaccttttctggccatgaaccattataaaatcccaacatatatactgaaaatactgaaactgctttgaaaatttggaatttctgatacctccagtgggccgagagacacggtgggtaaaggatgtgggcagcagcagggaagacaacagaaacacaaggaggcggctgtggccgggctggactgtgctggggtttgttgtgatggccactcggtgacctggcggtccctacgcaatagcagctgcctgtggggaagaagggctgcccagccagctggttctcccgggacaccagcagatccacaccctgggcacctccgtgtttggtcttttttttcccctgtgtgaaagaagaaacggcacgaccccttctcaagctggctcactcagacacattgggacaaaccctggacagccatgccagagagaggcctttgaccggccccagagctaaaagcaccagagaaaatcaaatgcttcctactcagcgtgacccaacttttctagtgtgccacggccccaccacctcctgcagtacccacaccatcaccactgctttctcttccaacagtgatctgtattcttagtttcattattttcttttgattgatatgacactatataaaattttcatttgagaatttctcaattgtatctagttaaatagcacagtttggaaacttgtctgagactgactttatcaataatctaaccgacaaagatcatatccatgtgtatgtggttagacatttttatttcattgactaacccaggacagtttcagtgatgcaaattgtgtgccctctggttcagctgaaacagtcctggactttcaaaaaccttgaataagtctcccacagttgtataaattggacaatttaggaattttaaactttagatgatcatttggttccatttttatttcatttttatttttgttaatgcaaacaggacttaaatgaactttgatctctgttttaaagattattaaaaaacattgtgtatctatacatatggctcttgaggacttagctttcactacactacaggatatgatctccatgtagtccatataaacctgcagagtgattttccagagtgctcgatactgttaattacatctccattagggctgaaaagaatgacctacgtttctgtatacagctgtgttgcttttgatgttgtgttactgtacacagaagtgtgtgcactgaggctctgcgtgtggtccgtatggaaagcctggtagccctgcgagttaagtactgcttccattcattgtttacgctggaatttttctccccatggaatgtaagtaaaacttaagtgtttgtcatcaataaatggtaatactaaa

SEQ ID NO: 4592 - DNA, 643 bp, Homo sapiens
  source 1..643: mol_type = genomic DNA
ttaaccacttaacctctcagaactgaacaaagacaacattgttcctggaacgccctctttttaaaaaagctttttccccttcagcatttatccatgagacaatcaccaagatgacccagggattgtactgcgttgcaggcttctgccatttgaccttcctgcctgccagggttttgagttcatgctgttgtttgtacttaaatgagtagcctgatggactgcagaacatataataaaggagacccctgatgtcctgatgtgtgaagtgtcaagggggtggaagccgtgcactgagggaatcctaaaagtaagacctacaagaaaaatcagctatgaaggcaacataacccctactgtagaactaaatgcactgtgcatgaaacttggaaaaaaaccaatgtataagcctgttgacccttactctcggatgcagtccacctataactacaacatgagaggaggtgcttatcccccgaggtacttttacccatttccagttccacctttactttatcaagtggaactttctgtgggaggacagcaatttaatggcaaaggaaagacaagacaggctgcgaaacacgatgctgctgccaaagcgttgaggatcctgcagaatgagcccctgccagagaggctggag

SEQ ID NO: 4593 - DNA, 3136 bp, Homo sapiens
  source 1..3136: mol_type = genomic DNA
acttcctgccgggctgcgggcgcctgagcggctcttcagcgtttgcgccggcggctgccgcgtctctctcggctcccgcttcctttgaccgcctcccccccccggcccggcggcgcccgcctcctccacggccactccgcctcttccctcccttcgtcccttcttcctctcccttttttccttcttccttcccctcctcgccgccaccgcccaggaccgccggccgggggacgagctcggagcagcagccagaaagcataacccctactgtagaactaaatgcactgtgcatgaaacttggaaaaaaaccaatgtataagcctgttgacccttactctcggatgcagtccacctataactacaacatgagaggaggtgcttatcccccgaggtacttttacccatttccagttccacctttactttatcaagtggaactttctgtgggaggacagcaatttaatggcaaaggaaagacaagacaggctgcgaaacacgatgctgctgccaaagcgttgaggatcctgcagaatgagcccctgccagagaggctggaggtgaatggaagagaatccgaagaagaaaatctcaataaatctgaaataagtcaagtgtttgagattgcacttaaacggaacttgcctgtgaatttcgaggtggcccgggagagtggcccaccccacatgaagaactttgtgaccaaggtttcggttggggagtttgtgggggaaggtgaagggaaaagcaagaagatttcaaagaaaaatgccgccatagctgttcttgaggagctgaagaagttaccgcccctgcctgcagttgaacgagtaaagcctagaatcaaaaagaaaacaaaacccatagtcaagccacagacaagcccagaatatggccaggggatcaatccgattagccgactggcccagatccagcaggcaaaaaaggagaaggagccagagtacacgctcctcacagagcgaggcctcccgcgccgcagggagtttgtgatgcaggtgaaggttggaaaccacactgcagaaggaacgggcaccaacaagaaggtggccaagcgcaatgcagccgagaacatgctggagatccttggtttcaaagtcccgcaggcgcagcccaccaaacccgcactcaagtcagaggagaagacacccataaagaaaccaggggatggaagaaaagtaaccttttttgaacctggctctggggatgaaaatgggactagtaataaagaggatgagttcaggatgccttatctaagtcatcagcagctgcctgctggaattcttcccatggtgcccgaggtcgcccaggctgtaggagttagtcaaggacatcacaccaaagattttaccagggcagctccgaatcctgccaaggccacggtaactgccatgatagcccgagagttgttgtatgggggcacctcgcccacagccgagaccattttaaagaataacatctcttcaggccacgtaccccatggacctctcacgagaccctctgagcaactggactatctttccagagtccagggattccaggttgaatacaaagacttccccaaaaacaacaagaacgaatttgtatctcttatcaattgctcctctcagccacctctgatcagccatggtatcggcaaggatgtggagtcctgccatgatatggctgcgctgaacatcttaaagttgctgtctgagttggaccaacaaagtacagagatgccaagaacaggaaacggaccaatgtctgtgtgtgggaggtgctgaaccttttctggccatgaaccattataaaatcccaacatatatactgaaaatactgaaactgctttgaaaatttggaatttctgatacctccagtgggccgagagacacggtgggtaaaggatgtgggcagcagcagggaagacaacagaaacacaaggaggcggctgtggccgggctggactgtgctggggtttgttgtgatggccactcggtgacctggcggtccctacgcaatagcagctgcctgtggggaagaagggctgcccagccagctggttctcccgggacaccagcagatccacaccctgggcacctccgtgtttggtcttttttttcccctgtgtgaaagaagaaacggcacgaccccttctcaagctggctcactcagacacattgggacaaaccctggacagccatgccagagagaggcctttgaccggccccagagctaaaagcaccagagaaaatcaaatgcttcctactcagcgtgacccaacttttctagtgtgccacggccccaccacctcctgcagtacccacaccatcaccactgctttctcttccaacagtgatctgtattcttagtttcattattttcttttgattgatatgacactatataaaattttcatttgagaatttctcaattgtatctagttaaatagcacagtttggaaacttgtctgagactgactttatcaataatctaaccgacaaagatcatatccatgtgtatgtggttagacatttttatttcattgactaacccaggacagtttcagtgatgcaaattgtgtgccctctggttcagctgaaacagtcctggactttcaaaaaccttgaataagtctcccacagttgtataaattggacaatttaggaattttaaactttagatgatcatttggttccatttttatttcatttttatttttgttaatgcaaacaggacttaaatgaactttgatctctgttttaaagattattaaaaaacattgtgtatctatacatatggctcttgaggacttagctttcactacactacaggatatgatctccatgtagtccatataaacctgcagagtgattttccagagtgctcgatactgttaattacatctccattagggctgaaaagaatgacctacgtttctgtatacagctgtgttgcttttgatgttgtgttactgtacacagaagtgtgtgcactgaggctctgcgtgtggtccgtatggaaagcctggtagccctgcgagttaagtactgcttccattcattgtttacgctggaatttttctccccatggaatgtaagtaaaacttaagtgtttgtcatcaataaatggtaatactaaa

SEQ ID NO: 4594 - DNA, 3516 bp, Homo sapiens
  source 1..3516: mol_type = genomic DNA
acttcctgccgggctgcgggcgcctgagcggctcttcagcgtttgcgccggcggctgccgcgtctctctcggctcccgcttcctttgaccgcctcccccccccggcccggcggcgcccgcctcctccacggccactccgcctcttccctcccttcgtcccttcttcctctcccttttttccttcttccttcccctcctcgccgccaccgcccaggaccgccggccgggggacgagctcggagcagcagccaggtggagttttgctcttgtcgcccaggctggagtgcagtggcgtgatctcggctcactgcaacctccacctcccaggttcaagcgattttcccacttcagcctcccgataagctgagattacagagtttattaaccacttaacctctcagaactgaacaaagacaacattgttcctggaacgccctctttttaaaaaagaaagcataacccctactgtagaactaaatgcactgtgcatgaaacttggaaaaaaaccaatgtataagcctgttgacccttactctcggatgcagtccacctataactacaacatgagaggaggtgcttatcccccgaggtacttttacccatttccagttccacctttactttatcaagtggaactttctgtgggaggacagcaatttaatggcaaaggaaagacaagacaggctgcgaaacacgatgctgctgccaaagcgttgaggatcctgcagaatgagcccctgccagagaggctggaggtgaatggaagagaatccgaagaagaaaatctcaataaatctgaaataagtcaagtgtttgagattgcacttaaacggaacttgcctgtgaatttcgaggtggcccgggagagtggcccaccccacatgaagaactttgtgaccaaggtttcggttggggagtttgtgggggaaggtgaagggaaaagcaagaagatttcaaagaaaaatgccgccatagctgttcttgaggagctgaagaagttaccgcccctgcctgcagttgaacgagtaaagcctagaatcaaaaagaaaacaaaacccatagtcaagccacagacaagcccagaatatggccaggggatcaatccgattagccgactggcccagatccagcaggcaaaaaaggagaaggagccagagtacacgctcctcacagagcgaggcctcccgcgccgcagggagtttgtgatgcaggtgaaggttggaaaccacactgcagaaggaacgggcaccaacaagaaggtggccaagcgcaatgcagccgagaacatgctggagatccttggtttcaaagtcccgcaggcgcagcccaccaaacccgcactcaagtcagaggagaagacacccataaagaaaccaggggatggaagaaaagtaaccttttttgaacctggctctggggatgaaaatgggactagtaataaagaggatgagttcaggatgccttatctaagtcatcagcagctgcctgctggaattcttcccatggtgcccgaggtcgcccaggctgtaggagttagtcaaggacatcacaccaaagattttaccagggcagctccgaatcctgccaaggccacggtaactgccatgatagcccgagagttgttgtatgggggcacctcgcccacagccgagaccattttaaagaataacatctcttcaggccacgtaccccatggacctctcacgagaccctctgagcaactggactatctttccagagtccagggattccaggttgaatacaaagacttccccaaaaacaacaagaacgaatttgtatctcttatcaattgctcctctcagccacctctgatcagccatggtatcggcaaggatgtggagtcctgccatgatatggctgcgctgaacatcttaaagttgctgtctgagttggaccaacaaagtacagagatgccaagaacaggaaacggaccaatgtctgtgtgtgggaggtgctgaaccttttctggccatgaaccattataaaatcccaacatatatactgaaaatactgaaactgctttgaaaatttggaatttctgatacctccagtgggccgagagacacggtgggtaaaggatgtgggcagcagcagggaagacaacagaaacacaaggaggcggctgtggccgggctggactgtgctggggtttgttgtgatggccactcggtgacctggcggtccctacgcaatagcagctgcctgtggggaagaagggctgcccagccagctggttctcccgggacaccagcagatccacaccctgggcacctccgtgtttggtcttttttttcccctgtgtgaaagaagaaacggcacgaccccttctcaagctggctcactcagacacattgggacaaaccctggacagccatgccagagagaggcctttgaccggccccagagctaaaagcaccagagaaaatcaaatgcttcctactcagcgtgacccaacttttctagtgtgccacggccccaccacctcctgcagtacccacaccatcaccactgctttctcttccaacagtgatctgtattcttagtttcattattttcttttgattgatatgacactatataaaattttcatttgagaatttctcaattgtatctagttaaatagcacagtttggaaacttgtctgagactgactttatcaataatctaaccgacaaagatcatatccatgtgtatgtggttagacatttttatttcattgactaacccaggacagtttcagtgatgcaaattgtgtgccctctggttcagctgaaacagtcctggactttcaaaaaccttgaataagtctcccacagttgtataaattggacaatttaggaattttaaactttagatgatcatttggttccatttttatttcatttttatttttgttaatgcaaacaggacttaaatgaactttgatctctgttttaaagattattaaaaaacattgtgtatctatacatatggctcttgaggacttagctttcactacactacaggatatgatctccatgtagtccatataaacctgcagagtgattttccagagtgctcgatactgttaattacatctccattagggctgaaaagaatgacctacgtttctgtatacagctgtgttgcttttgatgttgtgttactgtacacagaagtgtgtgcactgaggctctgcgtgtggtccgtatggaaagcctggtagccctgcgagttaagtactgcttccattcattgtttacgctggaatttttctccccatggaatgtaagtaaaacttaagtgtttgtcatcaataaatggtaatactaaatttttttgttaatttattctcaaatgccactactgctaggttggtcccctcccaacttgcccctatcctttttttatttttaagaaaaaaactttgtaatgcttgtgattccatctgggcaaaagtctgaagatctgaaataactttatatcaaaccattgatcaataaacagctactaatg

SEQ ID NO: 4595 - DNA, 3130 bp, Homo sapiens
  source 1..3130: mol_type = genomic DNA
acttcctgccgggctgcgggcgcctgagcggctcttcagcgtttgcgccggcggctgccgcgtctctctcggctcccgcttcctttgaccgcctcccccccccggcccggcggcgcccgcctcctccacggccactccgcctcttccctcccttcgtcccttcttcctctcccttttttccttcttccttcccctcctcgccgccaccgcccaggaccgccggccgggggacgagctcggagcagcagccagaaagcataacccctactgtagaactaaatgcactgtgcatgaaacttggaaaaaaaccaatgtataagcctgttgacccttactctcggatgcagtccacctataactacaacatgagaggaggtgcttatcccccgaggtacttttacccatttccagttccacctttactttatcaagtggaactttctgtgggaggacagcaatttaatggcaaaggaaagacaagacaggctgcgaaacacgatgctgctgccaaagcgttgaggatcctgcagaatgagcccctgccagagaggctggaggtgaatggaagagaatccgaagaagaaaatctcaataaatctgaaataagtcaagtgtttgagattgcacttaaacggaacttgcctgtgaatttcgaggtggcccgggagagtggcccaccccacatgaagaactttgtgaccaaggtttcggttggggagtttgtgggggaaggtgaagggaaaagcaagaagatttcaaagaaaaatgccgccatagctgttcttgaggagctgaagaagttaccgcccctgcctgcagttgaacgagtaaagcctagaatcaaaaagaaaacaaaacccatagtcaagacaagcccagaatatggccaggggatcaatccgattagccgactggcccagatccagcaggcaaaaaaggagaaggagccagagtacacgctcctcacagagcgaggcctcccgcgccgcagggagtttgtgatgcaggtgaaggttggaaaccacactgcagaaggaacgggcaccaacaagaaggtggccaagcgcaatgcagccgagaacatgctggagatccttggtttcaaagtcccgcaggcgcagcccaccaaacccgcactcaagtcagaggagaagacacccataaagaaaccaggggatggaagaaaagtaaccttttttgaacctggctctggggatgaaaatgggactagtaataaagaggatgagttcaggatgccttatctaagtcatcagcagctgcctgctggaattcttcccatggtgcccgaggtcgcccaggctgtaggagttagtcaaggacatcacaccaaagattttaccagggcagctccgaatcctgccaaggccacggtaactgccatgatagcccgagagttgttgtatgggggcacctcgcccacagccgagaccattttaaagaataacatctcttcaggccacgtaccccatggacctctcacgagaccctctgagcaactggactatctttccagagtccagggattccaggttgaatacaaagacttccccaaaaacaacaagaacgaatttgtatctcttatcaattgctcctctcagccacctctgatcagccatggtatcggcaaggatgtggagtcctgccatgatatggctgcgctgaacatcttaaagttgctgtctgagttggaccaacaaagtacagagatgccaagaacaggaaacggaccaatgtctgtgtgtgggaggtgctgaaccttttctggccatgaaccattataaaatcccaacatatatactgaaaatactgaaactgctttgaaaatttggaatttctgatacctccagtgggccgagagacacggtgggtaaaggatgtgggcagcagcagggaagacaacagaaacacaaggaggcggctgtggccgggctggactgtgctggggtttgttgtgatggccactcggtgacctggcggtccctacgcaatagcagctgcctgtggggaagaagggctgcccagccagctggttctcccgggacaccagcagatccacaccctgggcacctccgtgtttggtcttttttttcccctgtgtgaaagaagaaacggcacgaccccttctcaagctggctcactcagacacattgggacaaaccctggacagccatgccagagagaggcctttgaccggccccagagctaaaagcaccagagaaaatcaaatgcttcctactcagcgtgacccaacttttctagtgtgccacggccccaccacctcctgcagtacccacaccatcaccactgctttctcttccaacagtgatctgtattcttagtttcattattttcttttgattgatatgacactatataaaattttcatttgagaatttctcaattgtatctagttaaatagcacagtttggaaacttgtctgagactgactttatcaataatctaaccgacaaagatcatatccatgtgtatgtggttagacatttttatttcattgactaacccaggacagtttcagtgatgcaaattgtgtgccctctggttcagctgaaacagtcctggactttcaaaaaccttgaataagtctcccacagttgtataaattggacaatttaggaattttaaactttagatgatcatttggttccatttttatttcatttttatttttgttaatgcaaacaggacttaaatgaactttgatctctgttttaaagattattaaaaaacattgtgtatctatacatatggctcttgaggacttagctttcactacactacaggatatgatctccatgtagtccatataaacctgcagagtgattttccagagtgctcgatactgttaattacatctccattagggctgaaaagaatgacctacgtttctgtatacagctgtgttgcttttgatgttgtgttactgtacacagaagtgtgtgcactgaggctctgcgtgtggtccgtatggaaagcctggtagccctgcgagttaagtactgcttccattcattgtttacgctggaatttttctccccatggaatgtaagtaaaacttaagtgtttgtcatcaataaatggtaatactaaa

SEQ ID NO: 4596 - DNA, 1083 bp, Homo sapiens
  source 1..1083: mol_type = genomic DNA
acttcctgccgggctgcgggcgcctgagcggctcttcagcgtttgcgccggcggctgccgcgtctctctcggctcccgcttcctttgaccgcctcccccccccggcccggcggcgcccgcctcctccacggccactccgcctcttccctcccttcgtcccttcttcctctcccttttttccttcttccttcccctcctcgccgccaccgcccaggaccgccggccgggggacgagctcggagcagcagccagacggagtctcgctcttttgccaggctggagtgcagtggcgcgatcctgagtcactgcaacctccacctcccaggttcaagcgattctcctgcttcagcctgccaagtagctgggactacagagtttattaaccacttaacctctcagaactgaacaaagacaacattgttcctggaacgccctctttttaaaaaagaaagcataacccctactgtagaactaaatgcactgtgcatgaaacttggaaaaaaaccaatgtataagcctgttgacccttactctcggatgcagtccacctataactacaacatgagaggaggtgcttatcccccgaggtacttttacccatttccagttccacctttactttatcaagtggaactttctgtgggaggacagcaatttaatggcaaaggaaagacaagacaggctgcgaaacacgatgctgctgccaaagcgttgaggatcctgcagaatgagcccctgccagagaggctggaggtgaatggaagagaatccgaagaagaaaatctcaataaatctgaaataagtcaagtgtttgagattgcacttaaacggaacttgcctgtgaatttcgagtctttccctctgaaacaggtggcccgggagagtggcccaccccacatgaagaactttgtgaccaaggtttcggttggggagtttgtgggggaaggtgaagggaaaagcaagaagatttcaaagaaaaatgccgccatagctgttcttgaggagctgaagaagttaccgcccctgcctgcagttgaacgagtaaagcctagaatcaaaaagaaaacaaaacccatagtcaag

SEQ ID NO: 4597 - DNA, 4061 bp, Homo sapiens
  source 1..4061: mol_type = genomic DNA
agttctctgtagtgtttgccaatgttggagccgtctgcaaagtgtccccggcaagaagaggctgcctaccacaaggactttagcttactttttaaagattgaagaaaaaaaagaagacagaaaaagaagaactcaaagatacacaaagtaatttgaaccaaggctcagaagtttttggagccgtgagggatacagcagtttggtcaatattgtcttaacatgcttcaaataaatcagatgttctcagtgcagctgagtcttggtgagcagacatgggaatccgaaggcagcagtataaagaaggctcagcaggctgttgccaataaagctttgactgaatctacgcttcccaaaccagttcagaagccacccaaaagtaatgttaacaataacccaggcagtataactccaactgtggaactgaatgggcttgctatgaaaaggggagagcctgccatctacaggccattagatccaaagccattcccaaattatagagctaattacaactttcggggcatgtacaatcagaggtatcattgcccagtgcctaagatcttttatgttcagctcactgtaggaaataatgaattttttggggaaggaaagactcgacaagctgctagacacaatgctgcaatgaaagccctccaagcactgcagaatgaacctattccagaaagatctcctcagaatggtgaatcaggaaaggatgtggatgatgacaaagatgcaaataagtctgagatcagcttagtgtttgaaattgctctgaagcgaaatatgcctgtcagttttgaggttattaaagaaagtggaccaccacatatgaaaagctttgttactcgagtgtcagtaggagagttctctgcagaaggagaaggaaatagcaaaaaactctccaagaagcgcgctgcgaccaccgtcttacaggagcttaaaaaacttccacctcttcctgtggtggaaaagccaaaactattttttaaaaaacgccctaaaacaatagtaaaggccggaccagaatatggccaagggatgaaccctattagccgcctggcgcaaattcaacaggccaaaaaggaaaaggagccggattatgttttgctttcagaaagaggaatgcctcgacgtcgagaatttgtgatgcaggtgaaggtaggcaatgaagttgctacaggaacaggacctaataaaaagatagccaaaaaaaatgctgcagaagcaatgctgttacaacttggttataaagcatccactaatcttcaggatcaacttgagaagacaggggaaaacaaaggatggagtggtccaaagcctgggtttcctgaaccaacaaataatactccaaaaggaattcttcatttgtctcctgatgtttatcaagagatggaagccagccgccacaaagtaatctctggcactactctaggctatttgtcacccaaagatatgaaccaaccttcaagctctttcttcagtatatctcccacatcgaatagttcagctacaattgccagggaactccttatgaatggaacatcttctacagctgaagccataggtttaaaaggaagttctcctactcccccttgttctccagtacaaccttcaaaacaactggaatatttagcaaggattcaaggctttcaggtatgaattaaaagcaaaaacaaaaaacaaaacaattcattagcctcagattcttcatctgtatacatcacaaggctcattcttgcctgctagtatggcctacatgccacttacgttttaagttatttaggaacacaaaggacagacaaaaaagccatatgcacatgcctcattttctcttatttttgatctatctagtaattcttttgctgcctgtctcttctccattttccttcttcttttttaagcatttttcatattcttcactgtcttctatttggtcttgattaggtgcatctatctcttcgctctgtcttccacaaacaaaaattctgccttcagacatttggtgttagtatttcacactcagttctccctttttttacataaggattgagtttctttttatgatgattttacctttatagcaattttgaattttgcattctattgctagtattgattcaggtacaccattaagatacaacattctagaagtctattaccttaggagttaattaaacatgatatttgaagaataatgaaatgctttatagttgtttgaggcataacaatgtgtatttgttttactggatcatgttttgaactgactagggagggtagcacctgcctcagatagtaccaacaattctgtttcactgggtagtctaaaactagcttatagtttaacttaacttgttgtgtatgtgaatttagggatggaaactttttttcccctatttattctttgtttccttctgggaaaaaaccccacaaaaatcagcactcctttatggatacattggagcttttgaaagaattgtaaactctaggaaggggaaatatctgtgtcttgatttcttagttgccttgaaaatcatgtactgaactgtaaccgctaacttgactggatgaactagtttgcttgtgtgtagagagtgtattgcttcctcagatttcactgttttcatctccttttccatcttagtctttattccttaagaccaaaaactgtaatatcctttagaaatgctctagaagatctgtattgtgtagaatgatcatgtatttataaatattttacaagtttagattataaaatgaaaaagaaggtcatgtgttttggggggtattttgcatgttcggatttttttttcacttcaccgaacccttctgattctttcaaactattgccaggtagttgttagtgtttctaattggactcttaatatgaacttcaagaagctgttaccagttatcggctctgtcatctgaaattttaaccacttaatttaaagttacaattttagaatttgtttttgttgttttaccttaagaaacacaataaatcactgtttaaaaaagatctcaatttatataaagtactggaaaaaagctaagtaatttttagttctatctataatctccgtaggatgaattagaaataaattgtgatgaaaagaaattaactgcttatttatgaatctaatcatttagaaatgtctgagagtaacactgcattcttatagaaacaaagcacaaattgcattcaagctctgaattgattttttgcttggagctgttgttacagtagctgtaattttgctaccagaatgtcttaattttttaaatttgtttttatttctaagctcttggcaatgacaataattataattttaacatatcttcactgtagtcaacatgtagagtctgcttccctcattattgcattgctaaggcctttttaaaaagcttatgcttacataatatactcttttttatggacacgttatatgtttccaaatctgtgtattgtgatttttacatactaatgaatataaacaggtgattttaaaatattactgtgcttctttggttgaatgagctggtattgatgtaaaatactctgtcattgatggaccactacctgcagctaagcagtgagcagaatctccgggaaatgacttagtctggccacatgcatagcccatcttcataatgtcgcagcagaaggttctttgtggttaaaagttttaaagcctatttctttataggtaaccctctcaggtatatttacctggtagaaaaacatgtagattgtttctattacttaaatgttttaattggactgtagtttagaaattacaggaccagcttgttacagattatacactattctgttacttttatttctgaaacttaaaaacaataaattctttttctgtgtttctaggttagaacttttttattttattgcacactgaacagatactgttgcttattgaatattgtgtaaacccttctttggctttccttgcccattgcaatttgatttaagcctactagagccattgtatgtgacagctatattgtattacaaagtaaaaatatatgagtgtattgaaaac

SEQ ID NO: 4598 - DNA, 3065 bp, Homo sapiens
  source 1..3065: mol_type = genomic DNA
agggcgcggcgggagcgccggggaggcgggcggaggcgggcggaggcggggggcggggagcccgaggggtggaagccggcggcggccgagcggggtcagttctctgtagtgtttgccaatgttggagccgtctgcaaagtgtccccggcaagaagaggctgcctaccacaaggactttagcttactttttaaagattgaagaaaaaaaagaagacagaaaaagaagaactcaaagatacacaaagtaatttgaaccaaggctcagaagtttttggagccgtgagggatacagcagtttggtcaatattgtcttaacatgcttcaaataaatcagcttctctccaagataaaatggcaaacccaaaagagaaaactgcaatgtgtctggtaaatgagttagcccgtttcaatagagtccaaccccagtataaacttctgaatgaaagagggcctgctcattcaaagatgttctcagtgcagctgagtcttggtgagcagacatgggaatccgaaggcagcagtataaagaaggctcagcaggctgttgccaataaagctttgactgaatctacgcttcccaaaccagttcagaagccacccaaaagtaatgttaacaataacccaggcagtataactccaactgtggaactgaatgggcttgctatgaaaaggggagagcctgccatctacaggccattagatccaaagccattcccaaattatagagctaattacaactttcggggcatgtacaatcagaggtatcattgcccagtgcctaagatcttttatgttcagctcactgtaggaaataatgaattttttggggaaggaaagactcgacaagctgctagacacaatgctgcaatgaaagccctccaagcactgcagaatgaacctattccagaaagatctcctcagaatggtgaatcaggaaaggatgtggatgatgacaaagatgcaaataagtctgagatcagcttagtgtttgaaattgctctgaagcgaaatatgcctgtcagttttgaggttattaaagaaagtggaccaccacatatgaaaagctttgttactcgagtgtcagtaggagagttctctgcagaaggagaaggaaatagcaaaaaactctccaagaagcgcgctgcgaccaccgtcttacaggagcttaaaaaacttccacctcttcctgtggtggaaaagccaaaactattttttaaaaaacgccctaaaacaatagtaaaggccggaccagaatatggccaagggatgaaccctattagccgcctggcgcaaattcaacaggccaaaaaggaaaaggagccggattatgttttgctttcagaaagaggaatgcctcgacgtcgagaatttgtgatgcaggtgaaggtaggcaatgaagttgctacaggaacaggacctaataaaaagatagccaaaaaaaatgctgcagaagcaatgctgttacaacttggttataaagcatccactaatcttcaggatcaacttgagaagacaggggaaaacaaaggatggagtggtccaaagcctgggtttcctgaaccaacaaataatactccaaaaggaattcttcatttgtctcctgatgtttatcaagagatggaagccagccgccacaaagtaatctctggcactactctaggctatttgtcacccaaagatatgaaccaaccttcaagctctttcttcagtatatctcccacatcgaatagttcagctacaattgccagggaactccttatgaatggaacatcttctacagctgaagccataggtttaaaaggaagttctcctactcccccttgttctccagtacaaccttcaaaacaactggaatatttagcaaggattcaaggctttcaggcagccttaagtgccttgaaacaattttctgaacaaggactggatccaatcgatggagcaatgaatatcgaaaaaggttctcttgaaaaacaagccaagcatctgagagagaaagcggacaataaccaggcacccccgggctccatcgctcaggactgcaagaaatcaaactcggccgtctagcagctcccagaacccgcggctgccaccgcatccttataaacctgtcagcacgcatgagggtgtctgtgttcagggaaatgaatgactaataccattatttgagtcttatgtgaagacaacactattctaacacgagagataatatacatggtactgtttattcaactggggaaaaataaaactttgagcatttcccttggaactcgagatcagatcataactcatttgcctagaggcagcagaaatctgatcctgctactggagcttaaaataacaagtaaagaaaagtgttagaaacaaagctaaaattttaacatgattaataatagagaagttgggtttggttctgttgttatgattgttttgtcgtggtgcttgtgttcagttatattctctctctctctcatttcaaatactgcttgacaattcgaaaatgaaccaatgatgtgctgtggaatgtgatggttgtcttcatatagagtcacatggtttctctttttatgcagatatttataatcttcatcctatatcagtaggaataactataaggtgcactacaaaaagatgtatgcaaacaaacatgttttaaatcaggtcagatatctgatgaaaaatacgaactaatgttaagagcaagtagtttcaacatactccaggaactgagaaacaaaacaaagcaattgtgggttttgagctccatatactcttagcaagtaagggggcgtcttgcccctatatatcatcttcccggattccactccctgttgtgggaatcgcgcccacccccatccgtgtgttgtagccactcacggtttgcatcaagagtgttttttgtaactgcctctggacttgggacagtgagtaggatcaaaaataaataatgtacatgacggggaagggaaaaacctgttggagttgcttccagccagccacgctccgggccagcatgttggaatccagcgtggagcagatgcagtaaaaatgtggttggtttctgtgtg

SEQ ID NO: 4599 - DNA, 2173 bp, Homo sapiens
  source 1..2173: mol_type = genomic DNA
agttctctgtagtgtttgccaatgttggagccgtctgcaaagtgtccccggcaagaagaggctgcctaccacaaggactttagcttactttttaaagattgaagaaaaaaaagaagacagaaaaagaagaactcaaagatacacaaagtaatttgaaccaaggctcagaagtttttggagccgtgagggatacagcagtttggtcaatattgtcttaacatgcttcaaataaatcagatgttctcagtgcagctgagtcttggtgagcagacatgggaatccgaaggcagcagtataaagaaggctcagcaggctgttgccaataaagctttgactgaatctacgcttcccaaaccagttcagaagccacccaaaagtaatgttaacaataacccaggcagtataactccaactgtggaactgaatgggcttgctatgaaaaggggagagcctgccatctacaggccattagatccaaagccattcccaaattatagagctaattacaactttcggggcatgtacaatcagagatgaagagttacctaagtcagtgttataagatgttccatggtaaaagggatttgaagacaaattttggaaatgctgcatactgtatctctcttgaagactcctaaaggtgtcatgaagaaaactgtttacctaagtggttcctaacactgactgaacatcaggctttcctgggcagctttaaaaattctgatgcccagactttatgtggactaattaaatcagaatttctggttgcagagcttgaaccgcactgttttttaaaacttccccaagtaattctatgtccagtcatttaaatactggtccccacaacccaaaacacattaccctctattaacatcaaagattatgagatggtttgaatagtcatagaacttttgaaagaagtaaagaagaagggaagaattacagttaaccacactccttaaggataattgttctggacagctagcttccccacattgctgagggttcacttttttttggaacctaaaactttacttagttcagtaattttggatagaaatatttctaaaagttatggcatatattttttatatccttaaatagaaaatgccacaattcttagcatgaagaatccttgctgttgactcattatcaaccttataaacaataagtattacaagcctcatgagatatgtacatggtttgtccttataccagataatcctagacatctgtttctagagtacccaagtgtgcttttagttactttccaaatcattgttgtcagtcagattgtcatcttatttcttgtttttgtcagtgcacctttgcatattgcttgctcctttctttgatgcttttcaattgctattatcttgaaaaccgatattattgtttgaatttggggcaaagtaagagtagcagggctttaattacgccctaagatgtccccttaactgtggaaaacatcgagttttatctagttggtgaatttttttacttcagaatttatttttttctgtcataaattttgctaaggatctgcattttgagtagaatgaagtggccagatagttgaataatggtttggtgaatatctatatgtatatatgtatgtgtatgtgtgttacacatacatatttaatgacatgaagtactttggttgcttggaattggacagaaataacagtttttttttttttttgggacagagtcttgctctgtcacctaggctggagtgcaatggcgcgatctctgctcactgcaacttccacctcccaggttcaagtgattctcctgccgcagcctcccgagtagctgggattgcaggcgcctgccagcatgcccgccagcacgcctggctaatttttttttttgtatttttagtagagatggggtttcactatgttggccaggctggtcttggaactcctgatctcgtgatctgtgtgccttggcctcccaaagtgctgggattacaggcgtgagccaccgcgcctggccagaaataacagttttaataaatttcatgaaatcactttcttgtatgttaaaggaaacagaaagggttcatttgtgcatggtttagtctttcttttgaatgtggaagtttttcttcttatttgtgtgtctaaaaaaattaaaaagtgaaacattttccaaaatgagaaga

SEQ ID NO: 4600 - DNA, 2646 bp, Homo sapiens
  source 1..2646: mol_type = genomic DNA
agcagtttggtcaatattgtcttaacatgcttcaaataaatcagatgttctcagtgcagctgagtcttggtgagcagacatgggaatccgaaggcagcagtataaagaaggctcagcaggctgttgccaataaagctttgactgaatctacgcttcccaaaccagttcagaagccacccaaaagtaatgttaacaataacccaggcagtataactccaactgtggaactgaatgggcttgctatgaaaaggggagagcctgccatctacaggccattagatccaaagccattcccaaattatagagctaattacaactttcggggcatgtacaatcagaggtatcattgcccagtgcctaagatcttttatgttcagctcactgtaggaaataatgaattttttggggaaggaaagactcgacaagctgctagacacaatgctgcaatgaaagccctccaagcactgcagaatgaacctattccagaaagatctcctcagaatggtgaatcaggaaaggatgtggatgatgacaaagatgcaaataagtctgagatcagcttagtgtttgaaattgctctgaagcgaaatatgcctgtcagttttgaggttattaaagaaagtggaccaccacatatgaaaagctttgttactcgagtgtcagtaggagagttctctgcagaaggagaaggaaatagcaaaaaactctccaagaagcgcgctgcgaccaccgtcttacaggagcttaaaaaacttccacctcttcctgtggtggaaaagccaaaactattttttaaaaaacgccctaaaacaatagtaaaggccggaccagaatatggccaagggatgaaccctattagccgcctggcgcaaattcaacaggccaaaaaggaaaaggagccggattatgttttgctttcagaaagaggaatgcctcgacgtcgagaatttgtgatgcaggtgaaggtaggcaatgaagttgctacaggaacaggacctaataaaaagatagccaaaaaaaatgctgcagaagcaatgctgttacaacttggttataaagcatccactaatcttcaggatcaacttgagaagacaggggaaaacaaaggatggagtggtccaaagcctgggtttcctgaaccaacaaataatactccaaaaggaattcttcatttgtctcctgatgtttatcaagagatggaagccagccgccacaaagtaatctctggcactactctaggctatttgtcacccaaagatatgaaccaaccttcaagctctttcttcagtatatctcccacatcgaatagttcagctacaattgccagggaactccttatgaatggaacatcttctacagctgaagccataggtttaaaaggaagttctcctactcccccttgttctccagtacaaccttcaaaacaactggaatatttagcaaggattcaaggctttcaggcagccttaagtgccttgaaacaattttctgaacaaggactggatccaatcgatggagcaatgaatatcgaaaaaggttctcttgaaaaacaagccaagcatctgagagagaaagcggacaataaccaggcacccccgggctccatcgctcaggactgcaagaaatcaaactcggccgtctagcagctcccagaacccgcggctgccaccgcatccttataaacctgtcagcacgcatgagggtgtctgtgttcagggaaatgaatgactaataccattatttgagtcttatgtgaagacaacactattctaacacgagagataatatacatggtactgtttattcaactggggaaaaataaaactttgagcatttcccttggaactcgagatcagatcataactcatttgcctagaggcagcagaaatctgatcctgctactggagcttaaaataacaagtaaagaaaagtgttagaaacaaagctaaaattttaacatgattaataatagagaagttgggtttggttctgttgttatgattgttttgtcgtggtgcttgtgttcagttatattctctctctctctcatttcaaatactgcttgacaattcgaaaatgaaccaatgatgtgctgtggaatgtgatggttgtcttcatatagagtcacatggtttctctttttatgcagatatttataatcttcatcctatatcagtaggaataactataaggtgcactacaaaaagatgtatgcaaacaaacatgttttaaatcaggtcagatatctgatgaaaaatacgaactaatgttaagagcaagtagtttcaacatactccaggaactgagaaacaaaacaaagcaattgtgggttttgagctccatatactcttagcaagtaagggggcgtcttgcccctatatatcatcttcccggattccactccctgttgtgggaatcgcgcccacccccatccgtgtgttgtagccactcacggtttgcatcaagagtgttttttgtaactgcctctggacttgggacagtgagtaggatcaaaaataaataatgtacatgacggggaagggaaaaacctgttggagttgcttccagccagccacgctccgggccagcatgttggaatccagcgtggagcagatgcagtaaaaatgtggttggtttctgtgtgaa

SEQ ID NO: 4601 - DNA, 2173 bp, Homo sapiens
  source 1..2173: mol_type = genomic DNA
actcttgcctcataaatctaggattcagggcattgttttcaatggttctcatttttggctccaaggattctttttcatgtgactaatattttcggtagaagaggaggtctggccacgccgcgggtcttggcgagcaggtgatcacggatccctggtgtttgctgggcgagacggtgaagcaacctcctccccgccccctcccccgtctagaaaggtgcaagatccgctaaaccgtgcgttgcacagcggcggccggagcagacgcgggatggtcgcgcgtcccctgcacagcacagaggggcagccggagagcctgggaaagtttttggagccgtgagggatacagcagtttggtcaatattgtcttaacatgcttcaaataaatcagatgttctcagtgcagctgagtcttggtgagcagacatgggaatccgaaggcagcagtataaagaaggctcagcaggctgttgccaataaagctttgactgaatctacgcttcccaaaccagttcagaagccacccaaaagtaatgttaacaataacccaggcagtataactccaactgtggaactgaatgggcttgctatgaaaaggggagagcctgccatctacaggccattagatccaaagccattcccaaattatagagctaattacaactttcggggcatgtacaatcagaggtatcattgcccagtgcctaagatcttttatgttcagctcactgtaggaaataatgaattttttggggaaggaaagactcgacaagctgctagacacaatgctgcaatgaaagccctccaagcactgcagaatgaacctattccagaaagatctcctcagaatggtgaatcaggaaaggatgtggatgatgacaaagatgcaaataagtctgagatcagcttagtgtttgaaattgctctgaagcgaaatatgcctgtcagttttgaggttattaaagaaagtggaccaccacatatgaaaagctttgttactcgagtgtcagtaggagagttctctgcagaaggagaaggaaatagcaaaaaactctccaagaagcgcgctgcgaccaccgtcttacaggagcttaaaaaacttccacctcttcctgtggtggaaaagccaaaactattttttaaaaaacgccctaaaacaatagtaaaggccggaccagaatatggccaagggatgaaccctattagccgcctggcgcaaattcaacaggccaaaaaggaaaaggagccggattatgttttgctttcagaaagaggaatgcctcgacgtcgagaatttgtgatgcaggtgaaggtaggcaatgaagttgctacaggaacaggacctaataaaaagatagccaaaaaaaatgctgcagaagcaatgctgttacaacttggttataaagcatccactaatcttcaggatcaacttgagaagacaggggaaaacaaaggatggagtggtccaaagcctgggtttcctgaaccaacaaataatactccaaaaggaattcttcatttgtctcctgatgtttatcaagagatggaagccagccgccacaaagtaatctctggcactactctaggctatttgtcacccaaagatatgaaccaaccttcaagctctttcttcagtatatctcccacatcgaatagttcagctacaattgccagggaactccttatgaatggaacatcttctacagctgaagccataggtttaaaaggaagttctcctactcccccttgttctccagtacaaccttcaaaacaactggaatatttagcaaggattcaaggctttcaggtatgaattaaaagcaaaaacaaaaaacaaaacaattcattagcctcagattcttcatctgtatacatcacaaggctcattcttgcctgctagtatggcctacatgccacttacgttttaagttatttaggaacacaaaggacagacaaaaaagccatatgcacatgcctcattttctcttatttttgatctatctagtaattcttttgctgcctgtctcttctccattttccttcttcttttttaagcatttttcatattcttcactgtcttctatttggtcttgattaggtgcatctatctcttcgctctgtcttccacaaacaaaaattctgccttcagacatttggtgttagtatttcacactca

SEQ ID NO: 4602 - DNA, 550 bp, Homo sapiens
  source 1..550: mol_type = genomic DNA
agttctctgtagtgtttgccaatgttggagccgtctgcaaagtgtccccggcaagaagagacgattttgccgtgttcgccaggctagtctcgaactcctgacctcaggtgatccgtccgcctcagactccaaaagtgctgggattacaggcgtgagccaccacacccagctgaggaggtggattttatgaaaccaaagaggctgcctaccacaaggactttagcttactttttaaagattgaagaaaaaaaagaagacagaaaaagaagaactcaaagatacacaaagtaatttgaaccaaggctcagaagtttttggagccgtgagggatacagcagtttggtcaatattgtcttaacatgcttcaaataaatcagatgttctcagtgcagctgagtcttggtgagcagacatgggaatccgaaggcagcagtataaagaaggctcagcaggctgttgccaataaagctttgactgaatctacgcttcccaaaccagttcagaagccacccaaaagtaatgttaacaataacccaggcagtataactcc

SEQ ID NO: 4603 - DNA, 727 bp, Homo sapiens
  source 1..727: mol_type = genomic DNA
agcggggtcagttctctgtagtgtttgccaatgttggagccgtctgcaaagtgtccccggcaagaagtttttggagccgtgagggatacagcagtttggtcaatattgtcttaacatgcttcaaataaatcagatgttctcagtgcagctgagtcttggtgagcagacatgggaatccgaaggcagcagtataaagaaggctcagcaggctgttgccaataaagctttgactgaatctacgcttcccaaaccagttcagaagccacccaaaagtaatgttaacaataacccaggcagtataactccaactgtggaactgaatgggcttgctatgaaaaggggagagcctgccatctacaggccattagatccaaagccattcccaaattatagagctaattacaactttcggggcatgtacaatcagaggtatcattgcccagtgcctaagatcttttatgttcagctcactgtaggaaataatgaattttttggggaaggaaagactcgacaagctgctagacacaatgctgcaatgaaagccctccaagcactgcagaatgaacctattccagaaagatctcctcagaatggtgaatcaggaaaggatgtggatgatgacaaagatgcaaataagtctgagatcagcttagtgtttgaaattgctctgaagcgaaatatgcctgtcagttttgaggttattaaagaaagtggaccaccacatatg

SEQ ID NO: 4604 - DNA, 5130 bp, Homo sapiens
  source 1..5130: mol_type = genomic DNA
atggagtgggtgctcgcggaagcgctgctctcgcagagccgggacccccgggccctgcttggggcgctgtgccaaggggaggcatccgcggagcgcgtggagacgctgcgcttccttctgcagcggctcgaggacgaggaggcgcgcggcagcgggggcgcaggcgcgctcccggaggcggcgcgcgaggtggctgcagggtacctcgtgccactgctgcggagcctgcgcggacgccccgcgggcggcccggaccccagtctgcagcctcgccaccgccggcgcgtgctgagggcggcgggcgcggccctgcgctcgtgcgtccgcctggccgggcgtccgcagctggcggccgcgctggctgaggaggcgctgcgcgatctgctcgccgggtggcgcgcgcctggcgccgaggctgccgtggaagtgctagcagccgtcgggccatgtttgcggccccgcgaggacgggccgctactggagcgcgtggcggggaccgccgtcgccctggcgctgggcgggggcggggacggggatgaggccgggcctgccgaggacgcggcggcgctggtggccgggcgactgctgccagtgctggtccaatgtggcggggcggcgctgcgggccgtgtggggcgggctggccgcgcctggggcgtccctggggtccggccgcgtagaggagaagctgctggtcctgagcgccctggccgagaagctgttgcccgagcccggcggcgaccgcgcccgcggcgcgcgcgaggcgggcccggacgcccggcgctgctggcgcttctggaggacggtgcaggcggggctgggccaggcggacgccctgacgcgcaagcgagcgcgctacctgctgcagagggcggtggaggtgtcggcggagctgggggccgactgcacctgcgggccccaggaaggaaacggcccaagtctgttttggtggtctgagaggaaaaaagatgagcttctaaagttttgggaaaattatattttaattatggagactttagaaggaaatcagatacatgttataaagccagttttaccaaagctaaacaatctgtttgaatatgcggtgtcagaggaaaatggatgttggctctttcacccatcctggcatatgtgtatttataaaagaatgtttgaaagtgaaaacaaaatcctgtccaaagaaggtgttatccattttttggagctgtatgaaacaaagattcttccattttcaccagaattttctgagtttattattggaccattaatggatgcgctttcagagagctctctgtatagcaggtccccaggccagccaataggaagctgttctccattgggactgaaattacagaagtttttagtcacttatatttctcttcttccagaagaaataaagagtagcttcctattgaagtttattcggaagatgacaagtaggcattggtgtgctgttcccattttgtttctatctaaggctttggcaaatgtcccaagacataaggccctgggtatagatgggcttcttgctctcagggatgttattcattgcactatgatcacacatcagattctcctgagaggggcagcccaatgctaccttcttcaaacagctatgaatttgctagatgtggagaaagtgtcactttctgatgtctcaacttttctcatgtctctgagacaagaggaatccttaggacgaggaacttcattgtggacagagctgtgtgactggctacgtgttaatgaaagctattttaagccatcccctacgtgtagctccattggacttcacaagacatctttaaatgcttatgtaaagagcattgttcaagagtatgttaagtcatctgcttgggaaacaggagaaaactgctttatgcctgattggtttgaagccaagcttgtttctctgatggtcttgctggctgtggatgtggaaggaatgaagactcagtatagcggaaagcagagaacagagaatgtattgcggatattcttagaccctcttctggatgtgcttatgaagtttagtaccaatgcctacatgcccttgctgaagactgacagatgcctccagctgctgttgaagctgttgaacacatgcaggttgaaaggttccagtgcccaagatgatgaggtgtctactgttcttcagaactttttcatgtctactacagagagcatttctgaatttattctcagaagacttactatgaatgagctaaatagtgtttcagatctggatcgttgccatttatacctgatggtgttaactgagcttataaatctgcatttgaaggttgggtggaaaaggggtaaccctatctggagagttatttctcttttgaaaaatgcatccattcagcatcttcaagagatggacagtggacaggagccaacagttggaagtcagattcagagagtagtgagcatggctgccttggccatggtgtgtgaggccatagaccagaagcctgagctgcagctggactctctccatgctgggcccctggaaagcttcctttcctctcttcagctcaatcagacgctgcagaagccccacgcagaggagcagagcagttatgctcaccccttggagtgcagcagtgttttggaagaatcgtcatcttcccaaggatggggaaaaatagttgcacaatatattcatgatcaatgggtgtgcctctctttcctgttgaaaaaatatcacacccttataccaaccacagggagtgaaattctggaaccgtttctacctgccgttcagatgccaataaggactttgcagtctgcactagaagccctcacagttctttcttctgatcaagttttaccagtgttccattgcttgaaagtgttggttcccaagcttctgacttcctctgaatcactctgcatagagtcttttgacatggcgtggaaaattatatcttctttaagcaacactcagctgatattctgggctaatttaaaagcttttgttcagtttgtttttgataacaaagttcttaccattgctgccaaaatcaagggccaggcatatttcaaaataaaagagattatgtacaagataattgaaatgtctgctataaagactggagtcttcaatacactgataagttactgctgtcagtcttggatagtgtctgcttcaaatgtgtcccaaggatctttatcaagtgctaaaaattatagcgaacttatccttgaggcttgtatatttggaactgtgtttaggcgtgatcaaagacttgttcaggatgtacagaccttcatagaaaaccttggacatgactgtgcggcaaatattgttatggaaaatactaagagagaagaccattatgtgagaatttgtgctgtcaaattcctgtgtttattagatggctccaatatgtcccacaagttgtttattgaggatcttgcaatcaagctattagataaagatgaattagtgtccaagtccaaaaaacgctactatgtgaattctctacagcacagagtgaaaaaccgagtgtggcagactctgctggtacttttccctagacttgaccagaatttcttgaatggaattattgacaggattttccaggctggtttcaccaacaatcaagcatccataaaatattttatagaatggattattatattgattcttcataaattccctcaatttcttccaaagttctgggattgtttttcttatggtgaagaaaatcttaaaacaagcatttgtacgtttttagcagttttatcacatttagacattattactcaaaatattccagaaaagaaactaattctgaagcaagcccttatagttgtgctgcagtggtgtttcaatcacaattttagtgttcgactgtatgctttagttgctcttaagaaactctggactgtgtgtaaagtgttaagtgttgaagaatttgatgccctgactcctgtgattgaatccagcctccatcaagtggaaagcatgcacggagcagggaatgccaagaagaattggcaacgcattcaggagcatttcttttttgcaacatttcacccactcaaggattattgtctagagaccatattttacatccttccacgcctttcaggccttattgaagatgaatggatcaccattgataaatttaccagattcactgatgttcctttagctgcgggatttcagtggtacctttctcaaactcaacttagtaaactaaaaccaggtgactggtctcagcaagacataggtactaatttggtcgaagcagataaccaagcggagtggaccgacgttcagaagaagattatcccgtggaacagtcgtgtttccgacttagacctggagctcctgtttcaggatcgtgctgccagacttggaaagtcaattagtagactcatcgttgtggcctcgctcatcgacaaaccgaccaatttaggaggactgtgcaggacctgtgaggtatttggggcttcagtgctcgttgttggcagccttcagtgtatcagcgacaaacagtttcagcacctcagtgtctctgcagaacagtggcttcctctagtggaggtaaaaccacctcagctaattgattatctgcagcagaagaaaacagaaggttataccatcattggagtggaacaaactgccaaaagtttagacctaacccaatattgctttcctgagaaatctctgctcttgttgggaaatgaacgtgagggaattccagcaaatctgatccaacagttggacgtttgtgtggaaattcctcaacagggcattatccgctccctgaatgtccatgtgagtggagccctgctgatctgggagtacaccaggcagcagctgctctcgcacggagataccaagccatgatgtgccttccttagtgaactgctgctgctgttcagacttttttaaaaaaaactatttggactaaagaaacagattctgaaatttattgtgataatttgtatttcttttttcttgcaatttaatgccaaaagtttgccatgtgccttaaacatattactatatattttcccctttaataaacactttttgttaaattgtattcttcctttaataaaatattttaagcaattgtggaaataaaacaatggattttttaagagagaa

SEQ ID NO: 4605 - DNA, 1368 bp, Homo sapiens
  source 1..1368: mol_type = genomic DNA
gctcttgggttctgtagttttctcgcgatccaaaaggctccgtgcccaaagcaaatgctggccgccaacccaggcaagaccccgatcagccttctgcaggagtatgggaccagaatagggaagacgcctgtgtacgaccttctcaaagccgagggccaagcccaccagcctaatttcaccttccgggtcaccgttggcgacaccagctgcactggtcagggccccagcaagaaggcagccaagcacaaggcagctgaggtggccctcaaacacctcaaaggggggagcatgctggagccggccctggaggacagcagttctttttctcccctagactcttcactgcctgaggacattccggtttttactgctgcagcagctgctaccccagttccatctgtagtcctaaccaggagcccccccatggaactgcagccccctgtctcccctcagcagtctgagtgcaaccccgttggtgctctgcaggagctggtggtgcagaaaggctggcggttgccggagtacacagtgacccaggagtctgggccagcccaccgcaaagaattcaccatgacctgtcgagtggagcgtttcattgagattgggagtggcacttccaaaaaattggcaaagcggaatgcggcggccaaaatgctgcttcgagtgcacacggtgcctctggatgcccgggatggcaatgaggtggagcctgatgatgaccacttctccattggtgtgggctcccgcctggatggtcttcgaaaccggggcccaggttgcacctgggattctctacgaaattcagtaggagagaagatcctgtccctccgcagttgctccctgggctccctgggtgccctgggccctgcctgctgccgtgtcctcagtgagctctctgaggagcaggcctttcacgtcagctacctggatattgaggagctgagcctgagtggactctgccagtgcctggtggaactgtccacccagccggccactgtgtgtcatggctctgcaaccaccagggaggcagcccgtggtgaggctgcccgccgtgccctgcagtacctcaagatcatggcaggcagcaagtgaagccccagctggactcatggatgtgcaccctttgctccctgctctttctgcctctgggctcatgtatctgcgcagctctggtaccctctgtgggtgccatctctacctctgacacagactgcctgccttgaagctgagaaggcacagggcaaggagccaaggaccacagagcctcagccagcccaggatccgtcctcattttattggtgatgatgaatgggaatgaaatcagggggctgtctactagagcctggaataaatatgctgctttgtgga

SEQ ID NO: 4606 - DNA, 1867 bp, Homo sapiens
  source 1..1867: mol_type = genomic DNA
tccagctgcgacacagatggcgcgcgggctcttgggttctgtagttttctcgcgatccaaaaggctccgtgcccaagtgagtccttaccgcctccctacccagcggcttcccctccgctagtacgcatgtccacagcttcacggaccgggagagagggggcgcggaaggaaggaggcgggacggtattacaaacaaaaaaatacggccttctcgagaagcgacggcggagggcccgctcctcccagaaggcggtgcagcctgcccgggcgagccacgcacgcagagggttgtggggcggatagctcccctccagatggaggctcacgaagtagggtgggcgggggactccatatcccagcgtgccccgcggcgggccctaccggccgcgactccgggcttggccccggccctagctcgtcggctgtgtattggggcgcgtggaggctgcagtcacggtggcgcccgcggggacggaggagggaatgagtgaagaggagcaaggctccggcactaccacgggctgcgggctgcctagtatagagcaaatgctggccgccaacccaggcaagaccccgatcagccttctgcaggagtatgggaccagaatagggaagacgcctgtgtacgaccttctcaaagccgagggccaagcccaccagcctaatttcaccttccgggtcaccgttggcgacaccagctgcactggtcagggccccagcaagaaggcagccaagcacaaggcagctgaggtggccctcaaacacctcaaaggggggagcatgctggagccggccctggaggacagcagttctttttctcccctagactcttcactgcctgaggacattccggtttttactgctgcagcagctgctaccccagttccatctgtagtcctaaccaggagcccccccatggaactgcagccccctgtctcccctcagcagtctgagtgcaaccccgttggtgctctgcaggagctggtggtgcagaaaggctggcggttgccggagtacacagtgacccaggagtctgggccagcccaccgcaaagaattcaccatgacctgtcgagtggagcgtttcattgagattgggagtggcacttccaaaaaattggcaaagcggaatgcggcggccaaaatgctgcttcgagtgcacacggtgcctctggatgcccgggatggcaatgaggtggagcctgatgatgaccacttctccattggtgtgggctcccgcctggatggtcttcgaaaccggggcccaggttgcacctgggattctctacgaaattcagtaggagagaagatcctgtccctccgcagttgctccctgggctccctgggtgccctgggccctgcctgctgccgtgtcctcagtgagctctctgaggagcaggcctttcacgtcagctacctggatattgaggagctgagcctgagtggactctgccagtgcctggtggaactgtccacccagccggccactgtgtgtcatggctctgcaaccaccagggaggcagcccgtggtgaggctgcccgccgtgccctgcagtacctcaagatcatggcaggcagcaagtgaagccccagctggactcatggatgtgcaccctttgctccctgctctttctgcctctgggctcatgtatctgcgcagctctggtaccctctgtgggtgccatctctacctctgacacagactgcctgccttgaagctgagaaggcacagggcaaggagccaaggaccacagagcctcagccagcccaggatccgtcctcattttattggtgatgatgaatgggaatgaaatcagggggctgtctactagagcctggaataaatatgctgctttgtggatttttaa

SEQ ID NO: 4607 - DNA, 4647 bp, Homo sapiens
  source 1..4647: mol_type = genomic DNA
aggctcccggctcgccgccatcttgtattggggtttcattgttcccgctgggccgggcggtttagtgtaattgccgccggaggaggaggcggagtaacctctggtcagccgagaaaccccactatcctgtagccataaccgcttaaacgatttgggaggtagtgaagggcagggagctggacctggaggcgccgccgcgacagcagcagccatggaggacgagatgcccaagactctatacgtcggtaacctttccagagatgtgacagaagctctaattctgcaactctttagccagattggaccttgtaaaaactgcaaaatgattatggatacagctggaaatgatccctattgttttgtggagtttcatgagcatcgtcatgcagctgcagcattagctgctatgaatggacggaagataatgggtaaggaagtcaaagtgaattgggcaacaacccctagcagtcaaaagaaagatacaagcagtagtaccgttgtcagcacacagcgttcacaagatcatttccatgtctttgttggtgatctcagcccagaaattacaactgaagatataaaagctgcttttgcaccatttggaagaatatcagatgcccgagtggtaaaagacatggcaacaggaaagtctaagggatatggctttgtctcctttttcaacaaatgggatgctgaaaacgccattcaacagatgggtggccagtggcttggtggaagacaaatcagaactaactgggcaacccgaaagcctcccgctccaaagagtacatatgagtcaaataccaaacagctatcatatgatgaggttgtaaatcagtctagtccaagcaactgtactgtatactgtggaggtgttacttctgggctaacagaacaactaatgcgtcagactttttcaccatttggacaaataatggaaattcgagtctttccagataaaggatattcatttgttcggttcaattcccatgaaagtgcagcacatgcaattgtttctgttaatggtactaccattgaaggtcatgttgtgaaatgctattggggcaaagaaactcttgatatgataaatcccgtgcaacagcagaatcaaattggatatccccaaccttatggccagtggggccagtggtatggaaatgcacaacaaattggccagtatatgcctaatggttggcaagttcctgcatatggaatgtatggccaggcatggaaccagcaaggatttaatcagacacagtcttctgcaccatggatgggaccaaattatggagtgcaaccgcctcaagggcaaaatggcagcatgttgcccaatcagccttctgggtatcgagtggcagggtatgaaacccagtgaataaggactccagaatctaaagccagtggcttgaggctacagggagtgtagtaaagccgttgtttacttaaagatttatcaaatcagtcagtgcaaatgtcagatacaatgtatttatttaaaagattcatttttaatcatgaaattacttatcatccacattgttttaaaaagaaacaagatgctggatgtctgccaatttttgccttcattaccttttttgataaagtttctcagatccttgtttcaaacacaaatgcagggattgctgccactttttaactattaagaggcagaaaattgcacaatattgaacttttttccactgaagtagtgtgcagttctagtttgcattcctgatatgatttaaaacatgtaatataaagatgttaaaaaaaaaaaccaaaactgtgcagagtctagaagttgtttgtcatcttcagcttgtgcacaattctgttttaggttaaaaaaaggcattgtttgagctgtcccatctccactgttatccctttggggttttttaatataaattattagtttacatcatttttgtatctacatcttttttcacaaatttgtcttgccttattaaagttctgtaaaatatacttaaatggaaaaaatgatgttcatttagattgaaaacttttctcagatggattgataattgcattcatcttgtgttttatatgagaaggtgcctcaagaatttcctgttggatttgtttaaaaggatttttatctttcgtgataaactttgctgtgtaccaggaactataaaaacaaaaacttgttactaaagaaaatatctgaaatgtgataagttcttatgccatgttaatttcatgtgtcaacttcaacatttacatgtattatttcattatgtaaaatgttttagcaatttaatattttgcacagttagcaaactttgtatgtcatttccttcaaggcatcatgcagagttgacatgagatttataaggttttaagttgtttgcatgtgaaaatcaaatacatactttggtagtctttgaatacaaagtcatctgctcttgtttttcaagaattttgagacacaaagttgtatgtaaaggaatatattaatttgccgttttctaggtagatttgctcaaaaagagtgaatcaacttaatatgtacaaatgatagctgtgaaactgtagaatatctttgtgtcaggcttggagttcattgtgacctccaaattttgcctgaaggaccagctgggcaaagcatcttttaaatgttcagaggccaaaagataaacaaaaaaaaaaccttaaaatcctacctctttaaacagccttcagataagagaatcctcagtgcaatcattattttgattcgtttggtacctgttttcctggagttcccgattttattattttggggtggctccaagcattaagaggtttaatctttgatggcattgttctagttttgaaatttctagtatatttcagagtctcttagaagacttgtgtgggaagtttcactttgttttcagtgaagatcacaaacctccttcttcctttactcaagaggaaaggtcccagtatacatatttgaatggttgatggttttcaagaccttcagggagctccctgcattttacctagaaacagaaaaggcccgcaaaatcttaagtttcctggcctgcatttcccgggtaggggcaaatgactccaagctggtctctaagccaatacccttataaaccagagcccaggaaagacagctcgagtgtataattctctggagctcaattctatgcagttgtgctgatatttcattaagtcactgtgtatttttaagtgttgatacattaaaagtcgctttatggaagatgagtaaattttttaaatacttggaaattttatttccttgttaacttctacagatcagggcatgcaaccaaaagcagcttaaatgaaatattttaaaataaaatatcaggaagctatttttagatttcttctggcttatgtttctactttaggaccctcattgttctcttattaaaaaaaattatttcctgtgcatctcatggactgcagggtaaattatttgggcataaataatttaaatagttttctttcattttgactatctccagtaataacagtttttattatccagcatattggcttattgcacaaatcttaaaatgtacattgactactttctgagaagaaagtggtatcagtactcatgatgaaaaggttactactgaacaaattcacatttcaggaacacctctatctttggtttaaatcttactcttagtttttccgtctaaaaatcatactggtattagtatcaggtaaggaaattaaagtttttaaaatggtttcattctctgcaatatgcaaaatttagattttactttctggtactgtaaagaacctgaagtgatttacacttaatgggtgattaatccagtattctttaccctgaatgtttggatattaaagttcctttatgttttctataacctgtgggatcttcttgcagtgattattgtgtgtgagattttttttctttttggtctatccatattgttatattcactcaggtattttttttttaatcttattccagaatcagtggtttatattgggttactgtttaacaccaaatggaattggcattctgcagatttaattaattatgaaaccagggtctcattttccttgctgatacttgttgaaaatgagattcacattctagtctttattttcctcctgttttgtccctgtgcttgtacatcttccttttatttgtgtgttatagttctattccatttgagaaggcagttggtaagaactagattgcatgtacaaagacaggtttactaagtgctgtacagtggtcctgaggttacagttgaattagaaaaacgaaatgtacttacaggaaataagaaagcaaacctttcaaatgagagtgatgatttctttaaaaaaaatcagtttttttctctcaaataatgttctttatttcacgaaatcgtcaatcttaagcatgagcagggataaacaactcctagaaggaactcaattcattcttcctggattttctctgttgttaaatcacaaaaatgatagtccccaatcgtttctttataggaggttattacatttcattacagtcactgcattttgactgttgtgtttagaatttgaatgtacatccaaaatgatgagtttcaatttaagagccttaataaaatgtgtgagtgtgtctcaattgaa

SEQ ID NO: 4608 - DNA, 4770 bp, Homo sapiens
  source 1..4770: mol_type = genomic DNA
gctcctaggctcccggctcgccgccatcttgtattggggtttcattgttcccgctgggccgggcggtttagtgtaattgccgccggaggaggaggcggagtaacctctggtcagccgagaaaccccactatcctgtagccataaccgcttaaacgatttgggaggtagtgaagggcagggagctggacctggaggcgccgccgcgacagcagcagccatggaggacgagatgcccaagactctatacgtcggtaacctttccagagatgtgacagaagctctaattctgcaactctttagccagattggaccttgtaaaaactgcaaaatgattatggatacagctggaaatgatccctattgttttgtggagtttcatgagcatcgtcatgcagctgcagcattagctgctatgaatggacggaagataatgggtaaggaagtcaaagtgaattgggcaacaacccctagcagtcaaaagaaagatacaagcagtagtaccgttgtcagcacacagcgttcacaagatcatttccatgtctttgttggtgatctcagcccagaaattacaactgaagatataaaagctgcttttgcaccatttggaagaatatcagatgcccgagtggtaaaagacatggcaacaggaaagtctaagggatatggctttgtctcctttttcaacaaatgggatgctgaaaacgccattcaacagatgggtggccagtggcttggtggaagacaaatcagaactaactgggcaacccgaaagcctcccgctccaaagagtacatatgagtgtaggtgtattggagaagaaaaggaaatgtggaattttggagaaaaatacgctagattttgttcccggagacttattgcagaaatagatgagaagcaaatcaagactactattcaaaaatcaaataccaaacagctatcatatgatgaggttgtaaatcagtctagtccaagcaactgtactgtatactgtggaggtgttacttctgggctaacagaacaactaatgcgtcagactttttcaccatttggacaaataatggaaattcgagtctttccagataaaggatattcatttgttcggttcaattcccatgaaagtgcagcacatgcaattgtttctgttaatggtactaccattgaaggtcatgttgtgaaatgctattggggcaaagaaactcttgatatgataaatcccgtgcaacagaatcaaattggatatccccaaccttatggccagtggggccagtggtatggaaatgcacaacaaattggccagtatatgcctaatggttggcaagttcctgcatatggaatgtatggccaggcatggaaccagcaaggatttaatcagacacagtcttctgcaccatggatgggaccaaattatggagtgcaaccgcctcaagggcaaaatggcagcatgttgcccaatcagccttctgggtatcgagtggcagggtatgaaacccagtgaataaggactccagaatctaaagccagtggcttgaggctacagggagtgtagtaaagccgttgtttacttaaagatttatcaaatcagtcagtgcaaatgtcagatacaatgtatttatttaaaagattcatttttaatcatgaaattacttatcatccacattgttttaaaaagaaacaagatgctggatgtctgccaatttttgccttcattaccttttttgataaagtttctcagatccttgtttcaaacacaaatgcagggattgctgccactttttaactattaagaggcagaaaattgcacaatattgaacttttttccactgaagtagtgtgcagttctagtttgcattcctgatatgatttaaaacatgtaatataaagatgttaaaaaaaaaaaccaaaactgtgcagagtctagaagttgtttgtcatcttcagcttgtgcacaattctgttttaggttaaaaaaaggcattgtttgagctgtcccatctccactgttatccctttggggttttttaatataaattattagtttacatcatttttgtatctacatcttttttcacaaatttgtcttgccttattaaagttctgtaaaatatacttaaatggaaaaaatgatgttcatttagattgaaaacttttctcagatggattgataattgcattcatcttgtgttttatatgagaaggtgcctcaagaatttcctgttggatttgtttaaaaggatttttatctttcgtgataaactttgctgtgtaccaggaactataaaaacaaaaacttgttactaaagaaaatatctgaaatgtgataagttcttatgccatgttaatttcatgtgtcaacttcaacatttacatgtattatttcattatgtaaaatgttttagcaatttaatattttgcacagttagcaaactttgtatgtcatttccttcaaggcatcatgcagagttgacatgagatttataaggttttaagttgtttgcatgtgaaaatcaaatacatactttggtagtctttgaatacaaagtcatctgctcttgtttttcaagaattttgagacacaaagttgtatgtaaaggaatatattaatttgccgttttctaggtagatttgctcaaaaagagtgaatcaacttaatatgtacaaatgatagctgtgaaactgtagaatatctttgtgtcaggcttggagttcattgtgacctccaaattttgcctgaaggaccagctgggcaaagcatcttttaaatgttcagaggccaaaagataaacaaaaaaaaaaccttaaaatcctacctctttaaacagccttcagataagagaatcctcagtgcaatcattattttgattcgtttggtacctgttttcctggagttcccgattttattattttggggtggctccaagcattaagaggtttaatctttgatggcattgttctagttttgaaatttctagtatatttcagagtctcttagaagacttgtgtgggaagtttcactttgttttcagtgaagatcacaaacctccttcttcctttactcaagaggaaaggtcccagtatacatatttgaatggttgatggttttcaagaccttcagggagctccctgcattttacctagaaacagaaaaggcccgcaaaatcttaagtttcctggcctgcatttcccgggtaggggcaaatgactccaagctggtctctaagccaatacccttataaaccagagcccaggaaagacagctcgagtgtataattctctggagctcaattctatgcagttgtgctgatatttcattaagtcactgtgtatttttaagtgttgatacattaaaagtcgctttatggaagatgagtaaattttttaaatacttggaaattttatttccttgttaacttctacagatcagggcatgcaaccaaaagcagcttaaatgaaatattttaaaataaaatatcaggaagctatttttagatttcttctggcttatgtttctactttaggaccctcattgttctcttattaaaaaaaattatttcctgtgcatctcatggactgcagggtaaattatttgggcataaataatttaaatagttttctttcattttgactatctccagtaataacagtttttattatccagcatattggcttattgcacaaatcttaaaatgtacattgactactttctgagaagaaagtggtatcagtactcatgatgaaaaggttactactgaacaaattcacatttcaggaacacctctatctttggtttaaatcttactcttagtttttccgtctaaaaatcatactggtattagtatcaggtaaggaaattaaagtttttaaaatggtttcattctctgcaatatgcaaaatttagattttactttctggtactgtaaagaacctgaagtgatttacacttaatgggtgattaatccagtattctttaccctgaatgtttggatattaaagttcctttatgttttctataacctgtgggatcttcttgcagtgattattgtgtgtgagattttttttctttttggtctatccatattgttatattcactcaggtattttttttttaatcttattccagaatcagtggtttatattgggttactgtttaacaccaaatggaattggcattctgcagatttaattaattatgaaaccagggtctcattttccttgctgatacttgttgaaaatgagattcacattctagtctttattttcctcctgttttgtccctgtgcttgtacatcttccttttatttgtgtgttatagttctattccatttgagaaggcagttggtaagaactagattgcatgtacaaagacaggtttactaagtgctgtacagtggtcctgaggttacagttgaattagaaaaacgaaatgtacttacaggaaataagaaagcaaacctttcaaatgagagtgatgatttctttaaaaaaaatcagtttttttctctcaaataatgttctttatttcacgaaatcgtcaatcttaagcatgagcagggataaacaactcctagaaggaactcaattcattcttcctggattttctctgttgttaaatcacaaaaatgatagtccccaatcgtttctttataggaggttattacatttcattacagtcactgcattttgactgttgtgtttagaatttgaatgtacatccaaaatgatgagtttcaatttaagagccttaataaaatgtgtgagtgtgtctcaattgaa

SEQ ID NO: 4609 - DNA, 4633 bp, Homo sapiens
  source 1..4633: mol_type = genomic DNA
aactttgctggctgctcctaggctcccggctcgccgccatcttgtattggggtttcattgttcccgctgggccgggcggtttagtgtaattgccgccggaggaggaggcggagtaacctctggtcagccgagaaaccccactatcctgtagccataaccgcttaaacgatttgggaggtagtgaagggcagggagctggacctggaggcgccgccgcgacagcagcagccatggaggacgagatgcccaagactctatacgtcggtaacctttccagagatgtgacagaagctctaattctgcaactctttagccagattggaccttgtaaaaactgcaaaatgattatggatacagctggaaatgatccctattgttttgtggagtttcatgagcatcgtcatgcagctgcagcattagctgctatgaatggacggaagataatgggtaaggaagtcaaagtgaattgggcaacaacccctagcagtcaaaagaaagatacaagcaatcatttccatgtctttgttggtgatctcagcccagaaattacaactgaagatataaaagctgcttttgcaccatttggaagaatatcagatgcccgagtggtaaaagacatggcaacaggaaagtctaagggatatggctttgtctcctttttcaacaaatgggatgctgaaaacgccattcaacagatgggtggccagtggcttggtggaagacaaatcagaactaactgggcaacccgaaagcctcccgctccaaagagtacatatgagtcaaataccaaacagctatcatatgatgaggttgtaaatcagtctagtccaagcaactgtactgtatactgtggaggtgttacttctgggctaacagaacaactaatgcgtcagactttttcaccatttggacaaataatggaaattcgagtctttccagataaaggatattcatttgttcggttcaattcccatgaaagtgcagcacatgcaattgtttctgttaatggtactaccattgaaggtcatgttgtgaaatgctattggggcaaagaaactcttgatatgataaatcccgtgcaacagcagaatcaaattggatatccccaaccttatggccagtggggccagtggtatggaaatgcacaacaaattggccagtatatgcctaatggttggcaagttcctgcatatggaatgtatggccaggcatggaaccagcaaggatttaatcagacacagtcttctgcaccatggatgggaccaaattatggagtgcaaccgcctcaagggcaaaatggcagcatgttgcccaatcagccttctgggtatcgagtggcagggtatgaaacccagtgaataaggactccagaatctaaagccagtggcttgaggctacagggagtgtagtaaagccgttgtttacttaaagatttatcaaatcagtcagtgcaaatgtcagatacaatgtatttatttaaaagattcatttttaatcatgaaattacttatcatccacattgttttaaaaagaaacaagatgctggatgtctgccaatttttgccttcattaccttttttgataaagtttctcagatccttgtttcaaacacaaatgcagggattgctgccactttttaactattaagaggcagaaaattgcacaatattgaacttttttccactgaagtagtgtgcagttctagtttgcattcctgatatgatttaaaacatgtaatataaagatgttaaaaaaaaaaaccaaaactgtgcagagtctagaagttgtttgtcatcttcagcttgtgcacaattctgttttaggttaaaaaaaggcattgtttgagctgtcccatctccactgttatccctttggggttttttaatataaattattagtttacatcatttttgtatctacatcttttttcacaaatttgtcttgccttattaaagttctgtaaaatatacttaaatggaaaaaatgatgttcatttagattgaaaacttttctcagatggattgataattgcattcatcttgtgttttatatgagaaggtgcctcaagaatttcctgttggatttgtttaaaaggatttttatctttcgtgataaactttgctgtgtaccaggaactataaaaacaaaaacttgttactaaagaaaatatctgaaatgtgataagttcttatgccatgttaatttcatgtgtcaacttcaacatttacatgtattatttcattatgtaaaatgttttagcaatttaatattttgcacagttagcaaactttgtatgtcatttccttcaaggcatcatgcagagttgacatgagatttataaggttttaagttgtttgcatgtgaaaatcaaatacatactttggtagtctttgaatacaaagtcatctgctcttgtttttcaagaattttgagacacaaagttgtatgtaaaggaatatattaatttgccgttttctaggtagatttgctcaaaaagagtgaatcaacttaatatgtacaaatgatagctgtgaaactgtagaatatctttgtgtcaggcttggagttcattgtgacctccaaattttgcctgaaggaccagctgggcaaagcatcttttaaatgttcagaggccaaaagataaacaaaaaaaaaaccttaaaatcctacctctttaaacagccttcagataagagaatcctcagtgcaatcattattttgattcgtttggtacctgttttcctggagttcccgattttattattttggggtggctccaagcattaagaggtttaatctttgatggcattgttctagttttgaaatttctagtatatttcagagtctcttagaagacttgtgtgggaagtttcactttgttttcagtgaagatcacaaacctccttcttcctttactcaagaggaaaggtcccagtatacatatttgaatggttgatggttttcaagaccttcagggagctccctgcattttacctagaaacagaaaaggcccgcaaaatcttaagtttcctggcctgcatttcccgggtaggggcaaatgactccaagctggtctctaagccaatacccttataaaccagagcccaggaaagacagctcgagtgtataattctctggagctcaattctatgcagttgtgctgatatttcattaagtcactgtgtatttttaagtgttgatacattaaaagtcgctttatggaagatgagtaaattttttaaatacttggaaattttatttccttgttaacttctacagatcagggcatgcaaccaaaagcagcttaaatgaaatattttaaaataaaatatcaggaagctatttttagatttcttctggcttatgtttctactttaggaccctcattgttctcttattaaaaaaaattatttcctgtgcatctcatggactgcagggtaaattatttgggcataaataatttaaatagttttctttcattttgactatctccagtaataacagtttttattatccagcatattggcttattgcacaaatcttaaaatgtacattgactactttctgagaagaaagtggtatcagtactcatgatgaaaaggttactactgaacaaattcacatttcaggaacacctctatctttggtttaaatcttactcttagtttttccgtctaaaaatcatactggtattagtatcaggtaaggaaattaaagtttttaaaatggtttcattctctgcaatatgcaaaatttagattttactttctggtactgtaaagaacctgaagtgatttacacttaatgggtgattaatccagtattctttaccctgaatgtttggatattaaagttcctttatgttttctataacctgtgggatcttcttgcagtgattattgtgtgtgagattttttttctttttggtctatccatattgttatattcactcaggtattttttttttaatcttattccagaatcagtggtttatattgggttactgtttaacaccaaatggaattggcattctgcagatttaattaattatgaaaccagggtctcattttccttgctgatacttgttgaaaatgagattcacattctagtctttattttcctcctgttttgtccctgtgcttgtacatcttccttttatttgtgtgttatagttctattccatttgagaaggcagttggtaagaactagattgcatgtacaaagacaggtttactaagtgctgtacagtggtcctgaggttacagttgaattagaaaaacgaaatgtacttacaggaaataagaaagcaaacctttcaaatgagagtgatgatttctttaaaaaaaatcagtttttttctctcaaataatgttctttatttcacgaaatcgtcaatcttaagcatgagcagggataaacaactcctagaaggaactcaattcattcttcctggattttctctgttgttaaatcacaaaaatgatagtccccaatcgtttctttataggaggttattacatttcattacagtcactgcattttgactgttgtgtttagaatttgaatgtacatccaaaatgatgagtttcaatttaagagccttaataaaatgtgtgagtgtgtctcaattgaa

SEQ ID NO: 4610 - DNA, 515 bp, Homo sapiens
  source 1..515: mol_type = genomic DNA
aaaaaagaaagaaagaaagaaagaaagaaaagatacgtaggtaacctttccagagatgtgacagaagtccttatacttcagttgttcagtcagattggaccctgtaaaagctgtaaaatgataacagagcatacaagcaatgacccatattgctttgtggaattttatgaacacagagatgcagctgctgcattagctgctatgaatgggagaaaaattttgggaaaggaggtcaaagtaaactgggcaaccacaccaagtagccagaaaaaagatacttccaatcacttccatgtgtttgttggggatttgagtccagaaattacaacagaagatatcaaatcagcatttgccccctttggtaaaatatcggatgcccgggtagttaaagacatggcaactggaaaatccaaaggctatggttttgtatctttttataacaaactggatgcagaaaatgcgattgtgcatatgggcggtcagtggttgggtggtcgtcaaatccgaaccaattg

SEQ ID NO: 4611 - DNA, 1401 bp, Homo sapiens
  source 1..1401: mol_type = genomic DNA
accctgccctcccccttgtcccgggatcgctccgtcgcacccaccatgatggaagacgacgggcagccccggactctatacgtaggtaacctttccagagatgtgacagaagtccttatacttcagttgttcagtcagattggaccctgtaaaagctgtaaaatgataacagagcatacaagcaatgacccatattgctttgtggaattttatgaacacagagatgcagctgctgcattagctgctatgaatgggagaaaaattttgggaaaggaggtcaaagtaaactgggcaaccacaccaagtagccagaaaaaagatacttccaatcacttccatgtgtttgttggggatttgagtccagaaattacaacagaagatatcaaatcagcatttgccccctttggtaaaatatcggatgcccgggtagttaaagacatggcaactggaaaatccaaaggctatggttttgtatctttttataacaaactggatgcagaaaatgcgattgtgcatatgggcggtcagtggttgggtggtcgtcaaatccgaaccaattgggccactcgtaaaccacctgcacctaaaagtacacaagaaaacaacactaagcagttgagatttgaagatgtagtaaaccagtcaagtccaaaaaattgtactgtgtactgtggaggaattgcgtctgggttaacagatcagcttatgagacagacattctcaccatttggacaaattatggaaataagagttttcccagaaaagggctattcatttgtcagattttcaacccatgaaagtgcagcccatgccattgtttcggtgaacggtactacgattgaaggacatgtggttaaatgctattggggtaaagaatctcctgatatgactaaaaacttccaacaggttgactatagtcaatggggccaatggagccaagtgtatggaaacccacaacagtatggacagtatatggcaaatgggtggcaagtaccgccttatggagtatacgggcaaccatggaatcaacaaggatttggagtagatcaatcaccttctgctgcttggatgggtggatttggtgctcagcctccccaaggacaagctcctccccctgtaatacctcctcctaaccaagccggatatggtatggcaagttaccaaacacagtgagccgggactctaaaaaaaaattgtaattcatgataggcttcgatttcctgtgacactctgaagacatgaaagtagacatcggaaaatgaaaatatttattttaaaaattgaaatgtttggaacctttagcacagatttgctttggtgaaggacacgtgtcttctagttctgcctttttaagtttttgttcatgatggatatgaacatgatttttctttatgtacaaaa

SEQ ID NO: 4612 - DNA, 490 bp, Homo sapiens
  source 1..490: mol_type = genomic DNA
ttatacttcagttgttcagtcagattggaccctgtaaaagctgtaaaatgataacagagcatacaagcaatgacccatattgctttgtggaattttatgaacacagagatgcagctgctgcattagctgctatgaatgggagaaaaattttgggaaaggaggtcaaagtaaactgggcaaccacaccaagtagccagaaaaaagatacttccaatcacttccatgtgtttgttggggatttgagtccagaaattacaacagaagatatcaaatcagcatttgccccctttggtaaaatatcgtaagtatcataatcagtactacactcagtcatgataggcagaattgtatatgattaacttgtaattgaattaagattttctttctctagttagtatggttttgttttgtttcttatttttcatttatttattttggtttgttttgagtagtggatgttgttgaaaatgttaatgtcatttcagtgtct

SEQ ID NO: 4613 - DNA, 2187 bp, Homo sapiens
  source 1..2187: mol_type = genomic DNA
ttgtcccgggatcgctccgtcgcacccaccatgatggaagacgacgggcagccccggactctatacgtaggtaacctttccagagatgtgacagaagtccttatacttcagttgttcagtcagattggaccctgtaaaagctgtaaaatgataacagagcaacccgatagcagaagggtcaactcttctgttggattttctgttttgcagcatacaagcaatgacccatattgctttgtggaattttatgaacacagagatgcagctgctgcattagctgctatgaatgggagaaaaattttgggaaaggaggtcaaagtaaactgggcaaccacaccaagtagccagaaaaaagatacttccaatcacttccatgtgtttgttggggatttgagtccagaaattacaacagaagatatcaaatcagcatttgccccctttggtaaaatatcggatgcccgggtagttaaagacatggcaactggaaaatccaaaggctatggttttgtatctttttataacaaactggatgcagaaaatgcgattgtgcatatgggcggtcagtggttgggtggtcgtcaaatccgaaccaattgggccactcgtaaaccacctgcacctaaaagtacacaagaaaacaacactaagcagttgagatttgaagatgtagtaaaccagtcaagtccaaaaaattgtactgtgtactgtggaggaattgcgtctgggttaacagatcagcttatgagacagacattctcaccatttggacaaattatggaaataagagttttcccagaaaagggctattcatttgtcagattttcaacccatgaaagtgcagcccatgccattgtttcggtgaacggtactacgattgaaggacatgtggttaaatgctattggggtaaagaatctcctgatatgactaaaaacttccaacaggttgactatagtcaatggggccaatggagccaagtgtatggaaacccacaacagtatggacagtatatggcaaatgggtggcaagtaccgccttatggagtatacgggcaaccatggaatcaacaaggatttggagtagatcaatcaccttctgctgcttggatgggtggatttggtgctcagcctccccaaggacaagctcctccccctgtaatacctcctcctaaccaagccggatatggtatggcaagttaccaaacacagtgagccgggactctaaaaaaaaattgtaattcatgataggcttcgatttcctgtgacactctgaagacatgaaagtagacatcggaaaatgaaaatatttattttaaaaattgaaatgtttggaacctttagcacagatttgctttggtgaaggacacgtgtcttctagttctgcctttttaagtttttgttcatgatggatatgaacatgatttttctttatgtacaaaaactaaaataaagtcaataaagacaattctgactacaaattttgatataataggaaaaatggctaatacattttgattcttagatactattccatttttatcttgctgttcagtattttaactcactgtgtttttaaaagagcaaaaaagggaggatcgtgaaaacctgggaatcacatataagttcatcctgaatcctgatactcccctccccttccctgaggtggaccacatttgaagtcagcagagaaaaagtgtgatattcagaagaaatgcgtgattttggagtcgctttggaggaaatattttctttctctatgcctaaagaaactgaagccagactgaagttttgcaccctaaaaaaggaacagcattgtttgagttacttgagcaaatgttggtggtccacgttaagacatatttttaaaacttccaaaagtgtcgattattaaaattgtagtattttacatttcattttggggggaaatccaagtatggtgtttgtattgaagtcagacagtcatacttgtgcttttacatgaagtttaaatgatacatattgtaaatattcaataactacagtgtttaaaaagcatgcttcaacatagaagtagcagcaatgtaattatttgaagtaacacttaacacactccgctgcattgaatgcagtggattgatcagaatgttaagactgacatttccaaggttggctactatgtaaaattaaaattacacaaattgtgcagaaaaa

SEQ ID NO: 4614 - DNA, 2317 bp, Homo sapiens
  source 1..2317: mol_type = genomic DNA
tcttcacgtcccagcgcgggtgggcgccggcggctcctcttaaccacaggttccagaagtcctctgcagaagtgcttccctctctcatttccaggaccacaattcccagagacttcggcttcacgacgtttctctttttgcccgatctctcccggagctggctgggcttcggccggccagaggcccacagcgacgacgtgatccgtcgtgagcgggtcccagggtttcctcggcggcccttttttctctcccctcggtcgtcccccttgcaggctgtcgcggctggcctgagcggtgacctggcgggtcgcgcctgcgctctgccctgtttcctgcctggctggtggcggcggccattttgttcatcctcctcctcctcctgctcctcctggttggagcgcagtgtccggagcgggctggggggagagagcccgagagcagggttcggtgccttttcctctgtccccagccggtgcccagagcccccctccccttcctccccaccccctcccctccccaaccctgccctcccccttgtcccgggatcgctccgtcgcacccaccatgatggaagacgacgggcagccccggactctatacgtaggtaacctttccagagatgtgacagaagtccttatacttcagttgttcagtcagattggaccctgtaaaagctgtaaaatgataacagagcatacaagcaatgacccatattgctttgtggaattttatgaacacagagatgcagctgctgcattagctgctatgaatgggagaaaaattttgggaaaggaggtcaaagtaaactgggcaaccacaccaagtagccagaaaaaagatacttccaatcacttccatgtgtttgttggggatttgagtccagaaattacaacagaagatatcaaatcagcatttgccccctttggtaaaatatcaattgctcataagaatggacaggatcttgaaggctaactgcaaggaactgtgcacactggaactcagttgtagattttttttctcatttctatttattcttattatacattatttatatatacatattttagtatttacattttaacattctatattcagtggagttctatatttccaatcatttaacttactcactaaaatttctgtgtaaatttgttgttttcgtactggtgtgcttagcattgttgttagttttttattctcctttcttaaatttctgaaaatgtcaatttttcaaaatttacagctgcccaaactccaaaatgatggtagagaattgaccaagaaaaataaagaaatctgttaacaggccatggatgcccgggtagttaaagacatggcaactggaaaatccaaaggctatggttttgtatctttttataacaaactggatgcagaaaatgcgattgtgcatatgggcggtcagtggttgggtggtcgtcaaatccgaaccaattgggccactcgtaaaccacctgcacctaaaagtacacaagaaaacaacactaagcagttgagatttgaagatgtagtaaaccagtcaagtccaaaaaattgtactgtgtactgtggaggaattgcgtctgggttaacagatcagcttatgagacagacattctcaccatttggacaaattatggaaataagagttttcccagaaaagggctattcatttgtcagattttcaacccatgaaagtgcagcccatgccattgtttcggtgaacggtactacgattgaaggacatgtggttaaatgctattggggtaaagaatctcctgatatgactaaaaacttccaacaggttgactatagtcaatggggccaatggagccaagtgtatggaaacccacaacagtatggacagtatatggcaaatgggtggcaagtaccgccttatggagtatacgggcaaccatggaatcaacaaggatttggagtagatcaatcaccttctgctgcttggatgggtggatttggtgctcagcctccccaaggacaagctcctccccctgtaatacctcctcctaaccaagccggatatggtatggcaagttaccaaacacagtgagccgggactctaaaaaaaaattgtaattcatgataggcttcgatttcctgtgacactctgaagacatgaaagtagacatcggaaaatgaaaatatttattttaaaaattgaaatgtttggaacctttagcacagatttgctttggtgaaggacacgtgtcttctagttctgcctttttaagtttttgttcatgatggatatgaacatgatttttctttatgtacaaaaactaaaataaagtcaataaag

SEQ ID NO: 4615 - DNA, 1827 bp, Homo sapiens
  source 1..1827: mol_type = genomic DNA
gcccggatctcaaacagtcgggaagaagcaccgtggctgctattatctgctctccgcgcctgacccctcccaggactcgtgatgccaaggccgctgcgagcggctacgaagagtcggggttgagccccagctgagccgagggctcgcactcttctggtctcccaggcccaacccacctgaagaaatgagtggtggattggctccaagtaagagcacagtgtatgtatccaacttgcctttttccctgacaaacaatgacttgtaccggatattttccaagtatggcaaagttgtaaaggttaccatcatgaaagataaagataccaggaagagtaaaggggttgcatttattttatttttggataaagactctgcacaaaactgtaccagggcaataaacaacaaacagttatttggtagagtgataaaagcaagcattgctattgacaatggaagagcagctgagttcatccgaaggcgaaactactttgataaatctaagtgttatgaatgtggggaaagtggacacttaagttatgcctgtccgaaaaatatgctcggagaacgtgagcctccaaagaagaaagaaaaaaagaaaaaaaagaaagctcctgaaccagaagaagaaattgaggaagtagaagaaagtgaagatgaaggggaggatcctgctcttgacagcctcagtcaggccatagcattccagcaagccaaaattgaagaagaacaaaaaaaatggaaacccagttcaggagtcccctcaacatcagatgattcaagacgcccaaggataaagaaaagcacatatttcagtgatgaggaagaacttagtgattaaaatcttgccccagcacagtaataaaaatcaagatttgttagtaacaatcttgaagagctaattttaataaaaataagaaaaattaatactatcatgttaatactattattgtcatcccaagaaaaaagatattttaaaaatttatttgaaaagttcattataagggctttattcatgcctgatttgtttacatgaggacttctgaaattaatccttaaaacaaacttcctgaagaccgaaaagttgaatgatttattgttacttatattaataaacttttcaagagaattttgtctttaaatatgggtgttttgtcatcatatttcttgtagctttatcccaatctggataaattgtaaatacctataaaataaattataaatacctataaaatataaagtaacatagctctaaaaggcttaaaatcaaacacaggtgttatttgtctgccctacccatagcaccaaattccattccctagaagaaactacttacatgtgcacacatgtagctaaataaagtacatatatttcagtcacttaataaaagaataaaggagaattattcaatctcttatacttctcctaccttcctcaatattcccaatgtggctgtattaaaaatttgggggaatccatatatatcttttttaataaccaagtaaatacttttcatttctgagccaaggaatatgctatgattacgttttttcctagagttaataattgtctattttttttccatgtattgtctttgtatttatgactaaatcttcccattctgtctgcaggtgggtatatggtaatgggattagagagcctttaattttctgctttgtatatttctatattgtttaactttgtaagaatgcccattacttttttaactagtaaaagcaatagaaataagttaatactatcatagtaatattattattgtcatcccaagaaaaaatatattaaaaagatatttgaaatttcattataaaa

SEQ ID NO: 4616 - DNA, 4738 bp, Homo sapiens
  source 1..4738: mol_type = genomic DNA
agtgcggtcggaggcggcggtctgttctccgctgaggaggagcggggcagaggagggaggcagcgggtgagagttcagagttcagcagcagcagcccgagcccatgattcccatatgccctgtagtttctttcacctatgtgcccagccggctgggggaagatgccaaaatggcgaccggcaactactttggattcacccacagcggggcggcggcggcggcggctgcggcccaatatagccagcagccagcttcgggtgtagcctattctcatccaactacagttgctagctacactgtccatcaggctccagtagctgctcacacagttactgctgcctatgcaccagcagccgccacagttgcagttgccaggcctgctccagtagctgttgcagctgctgcaacagctgctgcttatggaggctaccccactgcacacacagcaactgactatggttatactcagaggcaacaagaagcaccaccaccaccacccccagctactacacaaaactaccaggattcatactcatatgtaaggtccacagctcctgctgtagcttatgatagtaagcaatactaccaacaaccaacagcaactgctgctgctgtagctgccgctgcccaacctcagccttctgttgctgaaacttactatcagacagcccccaaagcaggttacagccaaggtgcaactcagtatactcaagcccagcaaactcgacaagtgacagccataaaaccagccacaccaagtccagctaccactactttctccatctatcctgtatcctccaccgtacagccagtagcagctgcggctactgtggtgccatcctatactcagagtgctacttacagtaccacagcagttacatattctggtacgtcttattcaggttatgaagcagcagtgtattcagctgcatcttcctactatcaacagcagcagcagcaacagaagcaggcagcagcagcagctgctgctgctgctgcaacagctgcctggacagggaccacctttactaaaaaagcaccattccaaaataaacaactgaaaccaaaacagcctcccaaaccaccacagattcactattgtgatgtttgtaagatcagctgtgctggaccacagacttataaagaacatttagaaggacagaaacataaaaaaaaagaagctgcattgaaagcctcacaaaataccagcagcagcaacagttctactcgtgggactcaaaatcagctacgttgtgagctctgcgatgtgtcttgtacaggagcagatgcgtatgctgcccacattcgtggtgctaagcatcagaaagtggttaagttacacacaaaacttggtaaacccattccatcaacagaaccaaatgttgttagccaagctacttcttcaacagctgtatctgcttcaaagccgactgcctctccttcaagcattgcagcaaacaattgtactgtgaatacgtcatcagttgcaacgtcttcaatgaagggtcttacgactacaggaaactcgtctcttaatagcacatctaacactaaagtatcagcagtgcctacaaatatggctgccaagaaaacatctacccccaaaataaattttgttggtggtaataagctgcagtcaacaggaaataaagcagaagacataaaaggaaccgaatgtgttaaaagtactcctgtcacttctgctgtgcagattcctgaagtaaagcaagacacagtgtcagaaccagtcacacctgcatctcttgctgctttacagagtgatgtgcagccagtgggccatgattatgtggaagaggtacgaaatgatgaaggaaaagtaattcggttccattgtaaattatgcgagtgcagctttaatgatcccaatgctaaggagatgcacttaaaagggcgaagacacagacttcaatataaaaaaaaagtaaatccagatttgcaagtagaagtaaagcctagtattcgagcaagaaagattcaagaagagaaaatgaggaagcaaatgcagaaggaggagtactggcgaagacgagaagaagaggagcgttggagaatggaaatgagacgttatgaagaggacatgtactggaggagaatggaggaagaacaacatcattgggatgatcgccgccgaatgccagatggaggttatcctcatggtcctccaggcccattaggccttctgggagtccgaccaggcatgcctcctcagcctcaggggcctgcacccttacgtcgtcctgactcatctgatgaccgttatgtaatgacaaaacatgccaccatttatccaactgaagaggagttacaggcagttcagaaaattgtttctattactgaacgtgctttaaaactcgtttcagacagtttgtctgaacatgagaagaacaagaacaaagagggagatgataagaaagagggaggtaaagacagagctttgaaaggagttttgcgagtgggagtattggcaaaaggattacttctccgaggagatagaaatgtcaaccttgttttgctgtgctcagagaaaccttcaaagacattattaagccgtattgcagaaaacctacccaaacagcttgctgttataagccctgagaagtatgacataaaatgtgctgtatctgaagcggcaataattttgaattcatgtgtggaacccaaaatgcaagtcactatcacactgacatctccaattattcgagaagagaacatgagggaaggagatgtaacctcgggtatggtgaaagacccaccggacgtcttggacaggcaaaaatgccttgacgctctggctgctctacgccacgctaagtggttccaggctagagctaatggtctgcagtcctgtgtgattatcatacgcattcttcgagacctctgtcagcgagttccaacttggtctgattttccaagctgggctatggagttactagtagagaaagcaatcagcagtgcttctagccctcagagccctggggatgcactgagaagagtttttgaatgcatttcttcagggattattcttaaaggtagtcctggacttctggatccttgtgaaaaggatccctttgataccttggcaacaatgactgaccagcagcgtgaagacatcacatccagtgcacagtttgcattgagactccttgcattccgccagatacacaaagttctaggcatggatccattaccgcaaatgagccaacgttttaacatccacaacaacaggaaacgaagaagagatagtgatggagttgatggatttgaagctgaggggaaaaaagacaaaaaagattatgataacttttaaaaagtgtctgtaaatcttcagtgttaaaaaaacagatgcccatttgttggctgtttttcattcataataatgtctacattgaaaaatttatcaagaatttaaaggatttcatggaagaaccaagtttttctatgatattaaaaaatgtacagtgttaggtattatttgaatggaaagacacccaaaaaaaaaaatgtgctccgactagggggaaaacagtagttccgattttttcccattatttttattttattttctggttgccctagcttccccccctatttttgtgtcttttattaactagtgcattgtcttattaaatcttcactgtatttaatgcaggatgtgtgcttcagttgctctgtgtattttgatattttaatttagaggttttgtttgctttttgacactagttgtaagttactttgttatagatggtatcctttaccccttcttaatattttacagcagtacgtttttttgtaacgtgagactgcagagtttgtttttctatatgtgaaggattacaacacaaaaagttatcctgccattcgagtgctcagaactgaatgtttctgcagatcttgtggcatttgtctctagtgtgatatataaaggtgtaattaagacagagttctgttaatctaatcaagtttgctgttagttgtgcattagcagtataaaagctaatatatactatatggtcttgcaacagttttaaagcctctgcataattgataataaaaatgcatgacattcttgtttttaatagacttttaaaatcataattttaggtttaacacgtagatctttgtacagttgactttttgacatagcaaggccaaaaataactttctgaatatttttttcttgtgtataagtggaaagggcatttttcacatataagtgggctaaccaatattttcaaaagaacttcatcattgtacaactaacaacagtaactagcccttaattatggtgacagttccttattggtgtgtgtgagattactctagcaactattacagtataacacagatgatcttctccacacaccccatcacccagataatttacagttctgttaacagtgaggttgataaagtattactgataaaaaattatctaaggaaaaaaacagaaaattatttggtgtggccatcttacctgcttatgtctcctacacaaagctaaatattctagcagtgatgtaatgaaaaattacatcttactgttgatatatgtatgctctggtacacagatgtcattttgttgtcacagcactacagtgaaatacacaaaaaatgaaattcatataatgacttaaatgtattatatgttagaattgacaacataaactacttttgctttgaaatgatgtatgcttcagtaaaatcatattcaaattta

SEQ ID NO: 4617 - DNA, 650 bp, Homo sapiens
  source 1..650: mol_type = genomic DNA
gttctccgctgaggaggagcggggcagaggagggaggcagcgggtgagagttcagagttcagcagcagcagcccgagcccatgattcccatatgccctgtagtttctttcacctatgtgcccagccggctgggggaagatgccaaaatggcgaccggcaactactttggattcacccacagcggggcggcggcggcggcggctgcggcccaatatagccagcagccagcttcgggtgtagcctattctcatccaactacagttgctagctacactgtccatcaggctccagtagctgctcacacagttactgctgcctatgcaccagcagccgccacagttgcagttgccaggcctgctccagtagctgttgcagctgctgcaacagctgctgcttatggaggctaccccactgcacacacagcaactgactatggttatactcagaggcaacaagaagcaccaccaccaccacccccagctactacacaaaactaccaggattcatactcatatgtaaggtccacagctcctgctgtagcttatgatagtaagcaatactaccaacaaccagcagcaacagaagcaggcagcagcagcagctgctgctgctgctgcaacagctgcctggacagggaccacctttactaa

SEQ ID NO: 4618 - DNA, 3317 bp, Homo sapiens
  source 1..3317: mol_type = genomic DNA
gttctccgctgaggaggagcggggcagaggagggaggcagcgggtgagagttcagagttcagcagcagcagcccgagcccatgattcccatatgccctgtagtttctttcacctatgtgcccagccggctgggggaagatgccaaaatggcgaccggcaactactttggattcacccacagcggggcggcggcggcggcggctgcggcccaatatagccagcagccagcttcgggtgtagcctattctcatccaactacagttgctagctacactgtccatcaggctccagtagctgctcacacagttactgctgcctatgcaccagcagccgccacagttgcagttgccaggcctgctccagtagctgttgcagctgctgcaacagctgctgcttatggaggctaccccactgcacacacagcaactgactatggttatactcagaggcaacaagaagcaccaccaccaccacccccagctactacacaaaactaccaggattcatactcatatgtaaggtccacagctcctgctgtagcttatgatagtaagcaatactaccaacaaccaacagcaactgctgctgctgtagctgccgctgcccaacctcagccttctgttgctgaaacttactatcagacagcccccaaagcaggttacagccaaggtgcaactcagtatactcaagcccagcaaactcgacaagtgacagccataaaaccagccacaccaagtccagctaccactactttctccatctatcctgtatcctccaccgtacagccagtagcagctgcggctactgtggtgccatcctatactcagagtgctacttacagtaccacagcagttacatattctggtacgtcttattcaggttatgaagcagcagtgtattcagctgcatcttcctactatcaacagcagcagcagcaacagaagcaggcagcagcagcagctgctgctgctgctgcaacagctgcctggacagggaccacctttactaaaaaagcaccattccaaaataaacaactgaaaccaaaacagcctcccaaaccaccacagattcactattgtgatgtttgtaagatcagctgtgctggaccacagacttataaagaacatttagaaggacagaaacataaaaaaaaagaagctgcattgaaagcctcacaaaataccagcagcagcaacagttctactcgtgggactcaaaatcagctacgttgtgagctctgcgatgtgtcttgtacaggagcagatgcgtatgctgcccacattcgtggtgctaagcatcagaaagtggttaagttacacacaaaacttggtaaacccattccatcaacagaaccaaatgttgttagccaagctacttcttcaacagctgtatctgcttcaaagccgactgcctctccttcaagcattgcagcaaacaattgtactgtgaatacgtcatcagttgcaacgtcttcaatgaagggtcttacgactacaggaaactcgtctcttaatagcacatctaacactaaagtatcagcagtgcctacaaatatggctgccaagaaaacatctacccccaaaataaattttgttggtggtaataagctgcagtcaacaggaaataaagcagaagacataaaaggaaccgaatgtgttaaaagtactcctgtcacttctgctgtgcagattcctgaagtaaagcaagacacagtgtcagaaccagtcacacctgcatctcttgctgctttacagagtgatgtgcagccagtgggccatgattatgtggaagaggtacgaaatgatgaaggaaaagtaattcggttccattgtaaattatgcgagtgcagctttaatgatcccaatgctaaggagatgcacttaaaagggcgaagacacagacttcaatataaaaaaaaagtaaatccagatttgcaagtagaagtaaagcctagtattcgagcaagaaagattcaagaagagaaaatgaggaagcaaatgcagaaggaggagtactggcgaagacgagaagaagaggagcgttggagaatggaaatgagacgttatgaagaggacatgtactggaggagaatggaggaagaacaacatcattgggatgatcgccgccgaatgccagatggaggttatcctcatggtcctccaggcccattaggccttctgggagtccgaccaggcatgcctcctcagcctcaggggcctgcacccttacgtcgtcctgactcatctgatgaccgttatgtaatgacaaaacatgccaccatttatccaactgaagaggagttacaggcagttcagaaaattgtttctattactgaacgtgctttaaaactcgtttcagacagtttgtctgaacatgagaagaacaagaacaaagagggagatgataagaaagagggaggtaaagacagagctttgaaaggagttttgcgagtgggagtattggcaaaaggattacttctccgaggagatagaaatgtcaaccttgttttgctgtgctcagagaaaccttcaaagacattattaagccgtattgcagaaaacctacccaaacagcttgctgttataagccctgagaagtatgacataaaatgtgctgtatctgaagcggcaataattttgaattcatgtgtggaacccaaaatgcaagtcactatcacactgacatctccaattattcgagaagagaacatgagggaaggagatgtaacctcgggtatggtgaaagacccaccggacgtcttggacaggcaaaaatgccttgacgctctggctgctctacgccacgctaagtggttccagcaagctagagctaatggtctgcagtcctgtgtgattatcatacgcattcttcgagacctctgtcagcgagttccaacttggtctgattttccaagctgggctatggagttactagtagagaaagcaatcagcagtgcttctagccctcagagccctggggatgcactgagaagagtttttgaatgcatttcttcagggattattcttaaaggtagtcctggacttctggatccttgtgaaaaggatccctttgataccttggcaacaatgactgaccagcagcgtgaagacatcacatccagtgcacagtttgcattgagactccttgcattccgccagatacacaaagttctaggcatggatccattaccgcaaatgagccaacgttttaacatccacaacaacaggaaacgaagaagagatagtgatggaatggatttgaagctgaggggaaaaaagacaaaaaagattatgataacttttaaaaagtgtctgtaa

SEQ ID NO: 4619 - DNA, 866 bp, Homo sapiens
  source 1..866: mol_type = genomic DNA
gaagacgccaagatggcgacgagtcagtatttcgacttcgcgcagggcggcggcccgcagtacagtccagaagtggagaccactcccccggcccttgcatctgggcttccttgtgccctgccttggacagttggctgcagtggaagtgacgctgtgactgccctgtgcccaagcttaagaggccttgcctgcatctgctccatcttatgggaccctgcctggtgaaggacccaaggctggcctgctggaggaggagatataaggagaagagtcacagtgccccatccaacaggtagctgccctccaggggcagagaagcccagccatggtcaggagagccacccagctgaggcccacctccaccaggattgccacccagctgaaccccacctcagccaggagagccacccagctgagccccatctggccaggagagccatccagctgagccccacctctgccaggattgccacccagctgagccccgccttggccaggagagccacccagctgagccccgcctgggccagaagagccacccagctgagccccgccttggccagaagagccacccagctgagcaccgccttggccagaagaggcacccagctgagccccgcctggccaggagagctgcccagctgatccccgcctgcagaatcacaagtgaaataaatgattgttgctttgagtcagaggtcagcggaccttttctgtaaaaagccacatagtaaatatctttggctttgtgagccacaccatgtctgtcacattagtgaaccctgctattgtattgcaagatgagccgtggacaatgtgtcatccagtgggcttggctgtgtgccaataaaactttatttttttgg

SEQ ID NO: 4620 - DNA, 4757 bp, Homo sapiens
  source 1..4757: mol_type = genomic DNA
gaagacgccaagatggcgacgagtcagtatttcgacttcgcgcagggcggcggcccgcagtacagcgcccagcctccgacccttcccctgcccactgtgggggccagctatactgcacaacccactcctgggatggaccctgccgtgaacccggcctttcccccagctgccccggcagggtacggtggataccagccccactccggccaggacttcgcctacggcagccgaccccaggagcccgtccccacggccaccaccatggctacctaccaggacagttacagctacggacagtcagcagctgccaggagctatgaggacaggccgtacttccagtctgctgccctccagtctgggcgcatgacagccgcagactccggccagccagggacccaagaagcctgcgggcagcccagcccccatggcagtcacagccacgctcagcccccacagcaggcgcccatagtggagtccggacagccagcgagcaccttgtcctcgggatacacctaccccacggcgacaggcgtccagcccgagtcgtcagcttccatcgtgacctcctaccccccgccctcctacaaccccacctgcaccgcctacacggcaccaagctacccgaactatgacgcgtcggtgtactccgctgccagccctttctatcctccagcgcagcccccgcctcccccgggacccccgcagcagctgcccccgccgcccgcgcctgcaggctcaggaagcagccccagggccgactcgaagccaccgcttcccagcaagctgccgagacccaaggcggggcccaggcagctccagcttcactactgcgacatctgcaagatcagctgcgctggcccccagacctaccgggaacatctgggagggcagaagcacagaaagaaggaggcggcccagaagacaggcgtgcagcccaacgggagcccgcgcggggtgcaggcgcagctgcattgcgacctgtgcgccgtgtcctgcaccggggcggacgcctacgcggcccacatccggggatccaagcaccagaaggtcttcaagctgcacgccaaactggggaagcccattcccaccctcgagcctgcactggccacagagagcccccccggggcagaggccaagcccacgtcccccactggccccagcgtgtgtgcctcgagcaggccagcgctggccaagagacccgtggcctcgaaggccttatgcgaggggcctcctgagccacaggcagcaggctgcagaccccagtgggggaaaccagcccaacctaaattagagggtcccggagcacctacccaaggaggctcaaaggaagctcccgcgggctgctctgatgcgcagccggtgggcccggaatatgtggaggaggtgttcagcgacgaagggcgagtgcttcgcttccactgcaagctgtgcgagtgcagtttcaacgaccttaacgcgaaggacctgcacgtgagggggcggcggcaccggctgcagtaccggaagaaagtgaacccggaccttcccattgccacggagcccagcagccgggctcggaaggtcctggaggagcgcatgaggaagcagcggcacctggcggaggagcggctggagcagctgcggcgctggcacgcggagaggaggcggctggaggaggagccaccccaggacgtgccgccccacgcgccgcccgactgggcccagcctctgctcatgggcaggccggagtcacccgccagcgccccactccagcccgggcggcggccggcgtccagcgacgaccggcacgtcatgtgcaagcacgccaccatctaccccacggagcaggagctcctggccgtgcagagggccgtgtcccacgcagagcgggccctcaagctggtgtccgacacactggccgaggaggaccggggccgccgagaggaagagggtgacaagcgcagcagcgttgccccccagactcgggtcctgaaaggcgtcatgcgagtaggcatcctggcgaaaggcctcctcctgcgtggggacaggaacgtgcgcctcgctctgctctgctccgagaagcccacgcacagcctgctgcggaggatcgcccagcagctgccccggcagctccagatggtgaccgaggatgagtatgaggtctcctccgaccctgaagccaacattgtcatctcctcctgtgaggagcccaggatgcaggtcaccatatctgtcacctcacctctgatgcgggaggacccctccacagacccaggtgtggaggagcctcaggctgatgcaggtgatgtcctgagccccaagaagtgcctcgagtccctggccgccctccgtcatgccaggtggtttcaggctcgagccagcggcctgcagccatgcgtgatcgtcatcagggtcctgagggacctctgccggcgtgtgcccacctggggggccctgccagcctgggccatggagctgctggtggagaaggctgtgagcagtgcggctgggcccctgggccccggggatgcagtcaggcgagtcctggagtgcgtggccacagggacgctcctgacagacgggcccgggctccaggatccctgcgagagagaccagacagatgccctcgagcccatgaccctccaagagcgggaagacgtgaccgccagcgcccagcacgccctgcgaatgctggccttccggcagacccacaaggtcctgggcatggatctcctgccgcccagacaccggctgggggcccgcttccggaagaggcaacggggacctggcgagggagaggagggcgcaggggagaagaagcggggccggcggggcggagaggggctcgtgtgagccgcctacctcccccacctgcgggcctttgcatccctgcactcctggacgtgtgcgcgccgaccaatggctgcttcatccccgacgttggacaatggtcatttccttttgagtaacgctctgtaggtttcctttaaaacacctgtgcttcagaccgggcactgtggctcatgcctttaatcccagcactttgggaggctgagttgcttgagcctgagagttcaaggccagcccagacaacagagtgagacccccatctctccaaaatatttttaaaaatcagcttggcatggttggtggccaggcgcggtgattcacgcctgtaatcccagcactttgagaggccgaggtgggcagatcgcctgaggtcaggagttcgagaccggcctggtcaacatggtgaaaccctgtctctagtaaaaaacacaacaattagcctggcgtggtggtgtgcacctgtagtcccagctacttgggaggctgagtccggagccttgaggccaggagggcagtgagctgtgattgcaccgtgacactccagcctgggcaacagaagaagactttgtcacttaaaagaaatgttttttaacatttgtgcttaaattgttacagaaatgacaccatccagccctgggagtggcaccccttcctcgagggccccatcccccacagccaggggggccagcagtacagcaagcagattctaaactcgggggcatcttgctggctctaaactcacctcgtggtacaggaaggggttttaaaatacttcctctgggctgcgcatggtggctcacacctataatcccagcactttgggaggccaagcttggtggatcgcttgagcccagcggtttaagatcagtctgggcaatatggtgacaccccatctctacaaaaaattagccagttgtggtggcccaagcctgtagtcccagctactcgggaggctgaggccgtaggatcccttgagcccaggagttcgaggctgcagcgagccgagattgcgctactgaactccagcctgggttacagagcgagaccctgtctcaaagaaacaaacaaacaaacaaacaaacaaacaaaactttctttggatgcggctgcggcatggatttgaaatcacgtgggcaggccctgttctggggccccaccacatgtgcaggacaagcccaggggagctcccagccggcatccccacgcccccagcccagcctgctccaaacagaccccccacccacctccacagccaggatgtcagcagggcctgagccaggctcgtcccctgtggggagagccacagggccaggtggacacgccgacgggcgatgaggatcctggctgggcctcccccgggaacagctgtgctggacagtcagacccggagcccagaggcacccccacccaccccccgccccgagccctgtaccactgagtgcctttcacagagaaaacccactctgccatgtgtcactgaggcctggatttgagcttccgtccttccttcctccctctctccctgatgtaggccttggctggccctgaggcagggggtccccaatccccccttgtggtagcagggcccgggacccgtgcctgggggacccggggaggggccgccgtcttgtggatgctggccatggtgggcaggcgcctcctggcactgatggatgtgggggcacccccttctgagtccccaccccaacctgttcaaaccttccgcttggtcagtttttttttctttggccagctgcccagtggcattgaatgagaaaagtccacctttgggcagatgtgatctccagccagtggctcagttttgtttctctgtgtttgaaggacagcctgcatgtggctctgtctgaatgtctttgtagagctacctggaaattgggaggcagggggaataaaggaaatcatttgtc

SEQ ID NO: 4621 - DNA, 1377 bp, Homo sapiens
  source 1..1377: mol_type = genomic DNA
aagacgccaagatggcgacgagtcagtatttcgacttcgcgcagggcggcggcccgcagtacagcgcccagcctccgacccttcccctgcccactgtgggggccagctatactgcacaacccactcctgggatggaccctgccgtgaacccggcctttcccccagctgccccggcagggtacggtggataccagccccactccggccaggacttcgcctacggcagccgaccccaggagcccgtccccacggccaccaccatggctacctaccaggacagttacagctacggacagtcagcagctgccaggagctatgaggacaggccgtacttccagtctgctgccctccagtctgggcgcatgacagccgcagactccggccagccagggacccaagaagcctgcgggcagcccagcccccatggcagtcacagccacgctcagcccccacagcaggcgcccatagtggagtccggacagccagcgagcaccttgtcctcgggatacacctaccccacggcgacaggcgtccagcccgagtcgtcagcttccatcgtgacctcctaccccccgccctcctacaaccccacctgcaccgcctacacggcaccaagctacccgaactatgacgcgtcggtgtactccgctgccagccctttctatcctccagcgcagcccccgcctcccccgggacccccgcagcagctgcccccgccgcccgcgcctgcaggctcaggaagcagccccagggccgactcgaagccaccgcttcccagcaagctgccgagacccaaggcggggcccaggcagctccagcttcactactgcgacatctgcaagatcagctgcgctggcccccagacctaccgggaacatctgggagggcagaagcacagaaagaaggaggcggcccagaagacaggcgtgcagcccaacgggagcccgcgcggggtgcaggcgcagctgcattgcgacctgtgcgccgtgtcctgcaccggggcggacgcctacgcggcccacatccggggatccaagcaccagaagggcctcctgagccacaggcagcaggctgcagaccccagtgggggaaaccagcccaacctaaattagagggtcccggagcacctacccaaggaggctcaaaggaagctcccgcgggctgctctgatgcgcagccggtgggcccggaatatgtggaggaggtgttcagcgacgaagggcgagtgcttcgcttccactgcaagctgtgcgagtgcagtttcaacgaccttaacgcgaaggacctgcacgtgagggggcggcggcaccggctgcagtaccggaagaaagtgaacccggaccttcccattgccacggagcccagcagccgggctcg

SEQ ID NO: 4622 - DNA, 3228 bp, Homo sapiens
  source 1..3228: mol_type = genomic DNA
gggccgtgctgcttatggcggcgctggagagggggcgctgagctgttgggatgagctttgatccaaaccttctccacaacaatggacataatgggtaccctaatggtacttcagcagcactgcgtgaaactggggttattgaaaaactgttaacctcttacggatttattcagtgttcagaacgtcaagctagacttttcttccactgttcacagtataatggcaacctgcaagacttaaaagtaggagatgatgttgaatttgaagtatcatcggaccgacggactgggaaacccattgctgttaaactggtgaagataaaacaagaaatcctccctgaagaacgaatgaatggacaagaagtgttttatctgacttacacccctgaagatgtcgaagggaacgttcagctggaaactggagataaaataaactttgtaattgataacaataaacatactggtgctgtaagtgctcgcaacattatgctgttgaaaaagaaacaagcccgctgtcagggagtagtttgtgccatgaaggaggcatttggctttattgaaagaggtgatgttgtaaaagagatattctttcactatagtgaatttaagggtgacttagaaaccttacagcctggcgatgatgtggaattcacaatcaaggacagaaatggtaaagaagttgcaacagatgtcagactattgcctcaaggaacagtcatttttgaagatatcagcattgaacattttgaaggaactgtaaccaaagttatcccaaaagtacccagtaaaaaccagaatgacccattgccaggacgcatcaaagttgactttgtgatccctaaagaacttccctttggagacaaagatacgaaatccaaggtgaccctgctggaaggtgaccatgttaggtttaatatttcaacagaccgacgtgacaaattagagcgagcaaccaatatagaagttctgtcaaatacatttcagttcactaatgaagcccgagaaatgggtgtgattgctgccatgagagatggttttggtttcatcaagtgtgtggatcgtgatgttcgtatgttcttccacttcagtgaaattctggatgggaaccagctccatattgcagatgaagtagagtttactgtggttcctgatatgctctctgctcaaagaaatcatgctattaggattaaaaaacttcccaagggcacggtttcatttcattcccattcagatcaccgttttctgggcacggtagaaaaagaagccactttttccaatcctaaaaccactagcccaaataaaggcaaagagaaggaggctgaggatggcattattgcttatgatgactgtggggtgaaactgactattgcttttcaagccaaggatgtggaaggatctacttctcctcaaataggagataaggttgaatttagtattagtgacaaacagaggcctggacagcaggttgcaacttgtgtgcgacttttaggtcgtaattctaactccaagaggctcttgggttatgtggcaactctgaaggataattttggatttattgaaacagccaatcatgataaggaaatctttttccattacagtgagttctctggtgatgttgatagcctggaactgggggacatggtcgagtatagcttgtccaaaggcaaaggcaacaaagtcagtgcagaaaaagtgaacaaaacacactcagtgaatggcattactgaggaagctgatcccaccatttactctggcaaagtaattcgccccctgaggagtgttgatccaacacagactgagtaccaaggaatgattgagattgtggaggagggcgatatgaaaggtgaggtctatccatttggcatcgttgggatggccaacaaaggggattgcctgcagaaaggggagagcgtcaagttccaattgtgtgtcctgggccaaaatgcacaaactatggcttacaacatcacacccctgcgcagggccacagtggaatgtgtgaaagatcagtttggcttcattaactatgaagtaggagatagcaagaagctctttttccatgtgaaagaagttcaggatggcattgagctacaggcaggagatgaggtggagttctcagtgattcttaatcagcgcactggcaagtgcagcgcctgtaatgtttggcgagtctgtgagggccccaaggctgttgcagctcctcgacctgatcggttggtcaatcgcttgaagaatatcactctggatgatgccagtgctcctcgcctaatggttcttcgtcagccaaggggaccagataactcaatggggtttggtgcagaaagaaagatccgtcaagctggtgtcattgactaaccacatccacaaagcacaccattaatccactatgatcaagttggggggaatctggtgaagggttctgaatatctccctcttcatccctcccgaaatctggaatacttattctattgagctattacaccagttttaacaccttcctcgtgttatgtttaaaaaaataaataaatttaagaaaaccattttaaataatgcacagttgcagcctggaaaaacttaaggtggcgccttatagtatcaattttaggagctttatttggtgcatttaacgcaactggtaattgcagaatccactttgcctgtgtaagtgaaaaatatagactgttatcttgttggccctatgaaattctgcacttttcattatatactctaccttcattaattacttctggcaagatgttctgccttagcactcagttgcattcttttcctttttcttcctgttcattatgctttaattctgaggaccatatgagggtagaatatattatcttttaaaaattacaaaaatttgtataggcaaaccatttcttaaagttgatggccaaattttaaaatgttatttttcatatcatttataatcttgtcacaatccacttaaagaagtttggttatatttcagtgaaaattttcttccagagtaggttttttttcgtgggttggggggtaactttactacaattagtaagtatggtgcagaatttcatgcaaatgaggagtgccagcagtgtgataatttaaacatatttaaacaaaaacaaaaaaaatgaatgcacaaacttgctgctgcttagatcactgcagcttctaggacccggtttcttttactgatttaaaaacaaaacaaaaaaaaataaaaaagttgtgcctg

SEQ ID NO: 4623 - DNA, 4006 bp, Homo sapiens
  source 1..4006: mol_type = genomic DNA
ctacgtaccgggccgtgctgcttatggcggcgctggagagggggcgctgagctgttgggtatgaagtgtaacagaacagactttaccacctgaaactgctgcttcaagttcagatcaggcaaggaacaaacctcgtaacaactaacaagaccaaagaagagtacacttaagttgaagacacaacacttgatctgaaacaagaagtttgtgcctactcaacagctttgaaagagcacttcccaacgctgctagtagtctttgttttcttcagtgctgtactgtgagattgcccggtacagcagcagttgtattctttattagcttggtagatcattttctctcgctcttttttttaatactagcaactttcatcctttgaaacgtgtgctgaaaaagaagaatcagcaaatactactgaaagtgcaatatttgagtatcactgcgagatgagctttgatccaaaccttctccacaacaatggacataatgggtaccctaatggtacttcagcagcactgcgtgaaactggggttattgaaaaactgttaacctcttacggatttattcagtgttcagaacgtcaagctagacttttcttccactgttcacagtataatggcaacctgcaagacttaaaagtaggagatgatgttgaatttgaagtatcatcggaccgacggactgggaaacccattgctgttaaactggtgaagataaaacaagaaatcctccctgaagaacgaatgaatggacaagaagtgttttatctgacttacacccctgaagatgtcgaagggaacgttcagctggaaactggagataaaataaactttgtaattgataacaataaacatactggtgctgtaagtgctcgcaacattatgctgttgaaaaagaaacaagcccgctgtcagggagtagtttgtgccatgaaggaggcatttggctttattgaaagaggtgatgttgtaaaagagatattctttcactatagtgaatttaagggtgacttagaaaccttacagcctggcgatgatgtggaattcacaatcaaggacagaaatggtaaagaagttgcaacagatgtcagactattgcctcaaggaacagtcatttttgaagatatcagcattgaacattttgaaggaactgtaaccaaagttatcccaaaagtacccagtaaaaaccagaatgacccattgccaggacgcatcaaagttgactttgtgatccctaaagaacttccctttggagacaaagatacgaaatccaaggtgaccctgctggaaggtgaccatgttaggtttaatatttcaacagaccgacgtgacaaattagagcgagcaaccaatatagaagttctgtcaaatacatttcagttcactaatgaagcccgagaaatgggtgtgattgctgccatgagagatggttttggtttcatcaagtgtgtggatcgtgatgttcgtatgttcttccacttcagtgaaattctggatgggaaccagctccatattgcagatgaagtagagtttactgtggttcctgatatgctctctgctcaaagaaatcatgctattaggattaaaaaacttcccaagggcacggtttcatttcattcccattcagatcaccgttttctgggcacggtagaaaaagaagccactttttccaatcctaaaaccactagcccaaataaaggcaaagagaaggaggctgaggatggcattattgcttatgatgactgtggggtgaaactgactattgcttttcaagccaaggatgtggaaggatctacttctcctcaaataggagataaggttgaatttagtattagtgacaaacagaggcctggacagcaggttgcaacttgtgtgcgacttttaggtcgtaattctaactccaagaggctcttgggttatgtggcaactctgaaggataattttggatttattgaaacagccaatcatgataaggaaatctttttccattacagtgagttctctggtgatgttgatagcctggaactgggggacatggtcgagtatagcttgtccaaaggcaaaggcaacaaagtcagtgcagaaaaagtgaacaaaacacactcagtgaatggcattactgaggaagctgatcccaccatttactctggcaaagtaattcgccccctgaggagtgttgatccaacacagactgagtaccaaggaatgattgagattgtggaggagggcgatatgaaaggtgaggtctatccatttggcatcgttgggatggccaacaaaggggattgcctgcagaaaggggagagcgtcaagttccaattgtgtgtcctgggccaaaatgcacaaactatggcttacaacatcacacccctgcgcagggccacagtggaatgtgtgaaagatcagtttggcttcattaactatgaagtaggagatagcaagaagctctttttccatgtgaaagaagttcaggatggcattgagctacaggcaggagatgaggtggagttctcagtgattcttaatcagcgcactggcaagtgcagcgcctgtaatgtttggcgagtctgtgagggccccaaggctgttgcagctcctcgacctgatcggttggtcaatcgcttgaagaatatcactctggatgatgccagtgctcctcgcctaatggttcttcgtcagccaaggggaccagataactcaatggggtttggtgcagaaagaaagatccgtcaagctggtgtcattgactaaccacatccacaaagcacaccattaatccactatgatcaagttggggggaatctggtgaagggttctgaatatctccctcttcatccctcccgaaatctggaatacttattctattgagctattacaccagttttaacaccttcctcgtgttatgtttaaaaaaataaataaatttaagaaaaccattttaaataatgcacagttgcagcctggaaaaacttaaggtggcgccttatagtatcaattttaggagctttatttggtgcatttaacgcaactggtaattgcagaatccactttgcctgtgtaagtgaaaaatatagactgttatcttgttggccctatgaaattctgcacttttcattatatactctaccttcattaattacttctggcaagatgttctgccttagcactcagttgcattcttttcctttttcttcctgttcattatgctttaattctgaggaccatatgagggtagaatatattatcttttaaaaattacaaaaatttgtataggcaaaccatttcttaaagttgatggccaaattttaaaatgttatttttcatatcatttataatcttgtcacaatccacttaaagaagtttggttatatttcagtgaaaattttcttccagagtaggttttttttcgtgggttggggggtaactttactacaattagtaagtatggtgcagaatttcatgcaaatgaggagtgccagcagtgtgataatttaaacatatttaaacaaaaacaaaaaaaatgaatgcacaaacttgctgctgcttagatcactgcagcttctaggacccggtttcttttactgatttaaaaacaaaacaaaaaaaaataaaaaagttgtgcctgaaatgaatcttgtttttttttataagtagccgcctggttactgtgtcctgtaaaatacagacacttgacccttggtgtagcttctgttcaactttatatcacgggaatggatgggtctgatttcttggccctcttcttgaattggccatatacagggtccctggccagtggactgaaggctttgtctaagatgacaagggtcagctcaggggatgtgggggagggcggttttatcttcccccttgtcgtttgaggttttgatctctgggtaaagaggccgtttatctttgtaaacacgaaacatttttgctttctccagttttctgttaatggcgaaagaatggaagcgaataaagttttactgatttttgagacactagca

SEQ ID NO: 4624 - DNA, 4076 bp, Homo sapiens
  source 1..4076: mol_type = genomic DNA
gcttatggcggcgctggagagggggcgctgagctgttgggtatgaagtgtaacagaacagactttaccacctgaaactgctgcttcaagttcagatcaggcaaggaacaaacctcgtaacaactaacaagaccaaagaagagtacacttaagttgaagacacaacacttgatctgaaacaagaagtttgtgcctactcaacagctttgaaagagcacttcccaacgctgctagtagtctttgttttcttcagtgctgtactgtgagattgcccggtacagcagcagttgtattctttattagcttggtagatcattttctctcgctcttttttttaatactagcaactttcatcctttgaaacgtgtgctgaaaaagaagaatcagcaaatactactgaaagtgcaatatttgagtatcactgcgagatgagctttgatccaaaccttctccacaacaatggacataatgggtaccctaatggtacttcagcagcactgcgtgaaactggggttattgaaaaactgttaacctcttacggatttattcagtgttcagaacgtcaagctagacttttcttccactgttcacagtataatggcaacctgcaagacttaaaagtaggagatgatgttgaatttgaagtatcatcggaccgacggactgggaaacccattgctgttaaactggtgaagataaaacaagaaatcctccctgaagaacgaatgaatggacaagttgtgtgcgctgttcctcacaacttagagagtaaatctccagctgccccgggtcagagtccaacagggagtgtatgctacgaacgtaatggggaagtgttttatctgacttacacccctgaagatgtcgaagggaacgttcagctggaaactggagataaaataaactttgtaattgataacaataaacatactggtgctgtaagtgctcgcaacattatgctgttgaaaaagaaacaagcccgctgtcagggagtagtttgtgccatgaaggaggcatttggctttattgaaagaggtgatgttgtaaaagagatattctttcactatagtgaatttaagggtgacttagaaaccttacagcctggcgatgatgtggaattcacaatcaaggacagaaatggtaaagaagttgcaacagatgtcagactattgcctcaaggaacagtcatttttgaagatatcagcattgaacattttgaaggaactgtaaccaaagttatcccaaaagtacccagtaaaaaccagaatgacccattgccaggacgcatcaaagttgactttgtgatccctaaagaacttccctttggagacaaagatacgaaatccaaggtgaccctgctggaaggtgaccatgttaggtttaatatttcaacagaccgacgtgacaaattagagcgagcaaccaatatagaagttctgtcaaatacatttcagttcactaatgaagcccgagaaatgggtgtgattgctgccatgagagatggttttggtttcatcaagtgtgtggatcgtgatgttcgtatgttcttccacttcagtgaaattctggatgggaaccagctccatattgcagatgaagtagagtttactgtggttcctgatatgctctctgctcaaagaaatcatgctattaggattaaaaaacttcccaagggcacggtttcatttcattcccattcagatcaccgttttctgggcacggtagaaaaagaagccactttttccaatcctaaaaccactagcccaaataaaggcaaagagaaggaggctgaggatggcattattgcttatgatgactgtggggtgaaactgactattgcttttcaagccaaggatgtggaaggatctacttctcctcaaataggagataaggttgaatttagtattagtgacaaacagaggcctggacagcaggttgcaacttgtgtgcgacttttaggtcgtaattctaactccaagaggctcttgggttatgtggcaactctgaaggataattttggatttattgaaacagccaatcatgataaggaaatctttttccattacagtgagttctctggtgatgttgatagcctggaactgggggacatggtcgagtatagcttgtccaaaggcaaaggcaacaaagtcagtgcagaaaaagtgaacaaaacacactcagtgaatggcattactgaggaagctgatcccaccatttactctggcaaagtaattcgccccctgaggagtgttgatccaacacagactgagtaccaaggaatgattgagattgtggaggagggcgatatgaaaggtgaggtctatccatttggcatcgttgggatggccaacaaaggggattgcctgcagaaaggggagagcgtcaagttccaattgtgtgtcctgggccaaaatgcacaaactatggcttacaacatcacacccctgcgcagggccacagtggaatgtgtgaaagatcagtttggcttcattaactatgaagtaggagatagcaagaagctctttttccatgtgaaagaagttcaggatggcattgagctacaggcaggagatgaggtggagttctcagtgattcttaatcagcgcactggcaagtgcagcgcctgtaatgtttggcgagtctgtgagggccccaaggctgttgcagctcctcgacctgatcggttggtcaatcgcttgaagaatatcactctggatgatgccagtgctcctcgcctaatggttcttcgtcagccaaggggaccagataactcaatggggtttggtgcagaaagaaagatccgtcaagctggtgtcattgactaaccacatccacaaagcacaccattaatccactatgatcaagttggggggaatctggtgaagggttctgaatatctccctcttcatccctcccgaaatctggaatacttattctattgagctattacaccagttttaacaccttcctcgtgttatgtttaaaaaaataaataaatttaagaaaaccattttaaataatgcacagttgcagcctggaaaaacttaaggtggcgccttatagtatcaattttaggagctttatttggtgcatttaacgcaactggtaattgcagaatccactttgcctgtgtaagtgaaaaatatagactgttatcttgttggccctatgaaattctgcacttttcattatatactctaccttcattaattacttctggcaagatgttctgccttagcactcagttgcattcttttcctttttcttcctgttcattatgctttaattctgaggaccatatgagggtagaatatattatcttttaaaaattacaaaaatttgtataggcaaaccatttcttaaagttgatggccaaattttaaaatgttatttttcatatcatttataatcttgtcacaatccacttaaagaagtttggttatatttcagtgaaaattttcttccagagtaggttttttttcgtgggttggggggtaactttactacaattagtaagtatggtgcagaatttcatgcaaatgaggagtgccagcagtgtgataatttaaacatatttaaacaaaaacaaaaaaaatgaatgcacaaacttgctgctgcttagatcactgcagcttctaggacccggtttcttttactgatttaaaaacaaaacaaaaaaaaataaaaaagttgtgcctgaaatgaatcttgtttttttttataagtagccgcctggttactgtgtcctgtaaaatacagacacttgacccttggtgtagcttctgttcaactttatatcacgggaatggatgggtctgatttcttggccctcttcttgaattggccatatacagggtccctggccagtggactgaaggctttgtctaagatgacaagggtcagctcaggggatgtgggggagggcggttttatcttcccccttgtcgtttgaggttttgatctctgggtaaagaggccgtttatctttgtaaacacgaaacatttttgctttctccagttttctgttaatggcgaaagaatggaagcgaataaagttttactgatttttgagacact

SEQ ID NO: 4625 - DNA, 3774 bp, Homo sapiens
  source 1..3774: mol_type = genomic DNA
gagagaagcgagatttattcctacgtaccgggccgtgctgcttatggcggcgctggagagggggcgctgagctgttgggtatgaagtgtaacagaacagactttaccacctgaaactgctgcttcaagttcagatcaggcaaggaacaaacctcgtaacaactaacaagaccaaagaagagtacacttaagttgaagacacaacacttgatctgaaacaagaagtttgtgcctactcaacagctttgaaagagcacttcccaacgctgctagtagtctttgttttcttcagtgctgtactgtgagattgcccggtacagcagcagttgtattctttattagcttggtagatcattttctctcgctcttttttttaatactagcaactttcatcctttgaaacgtgtgctgaaaaagaagaatcagcaaatactactgaaagtgcaatatttgagtatcactgcgagctgtttgagatggagaacgtttttactgtgtcatcagatcctcatccctctcctgcagcccctccttcactttctttacccttatcttcatcttctacctcatctgggactaaaaaacaaaagaggaccccaacttatcagagatctatgagctttgatccaaaccttctccacaacaatggacataatgggtaccctaatggtacttcagcagcactgcgtgaaactggggttattgaaaaactgttaacctcttacggatttattcagtgttcagaacgtcaagctagacttttcttccactgttcacagtataatggcaacctgcaagacttaaaagtaggagatgatgttgaatttgaagtatcatcggaccgacggactgggaaacccattgctgttaaactggtgaagataaaacaagaaatcctccctgaagaacgaatgaatggacaagaagtgttttatctgacttacacccctgaagatgtcgaagggaacgttcagctggaaactggagataaaataaactttgtaattgataacaataaacatactggtgctgtaagtgctcgcaacattatgctgttgaaaaagaaacaagcccgctgtcagggagtagtttgtgccatgaaggaggcatttggctttattgaaagaggtgatgttgtaaaagagatattctttcactatagtgaatttaagggtgacttagaaaccttacagcctggcgatgatgtggaattcacaatcaaggacagaaatggtaaagaagttgcaacagatgtcagactattgcctcaaggaacagtcatttttgaagatatcagcattgaacattttgaaggaactgtaaccaaagttatcccaaaagtacccagtaaaaaccagaatgacccattgccaggacgcatcaaagttgactttgtgatccctaaagaacttccctttggagacaaagatacgaaatccaaggtgaccctgctggaaggtgaccatgttaggtttaatatttcaacagaccgacgtgacaaattagagcgagcaaccaatatagaagttctgtcaaatacatttcagttcactaatgaagcccgagaaatgggtgtgattgctgccatgagagatggttttggtttcatcaagtgtgtggatcgtgatgttcgtatgttcttccacttcagtgaaattctggatgggaaccagctccatattgcagatgaagtagagtttactgtggttcctgatatgctctctgctcaaagaaatcatgctattaggattaaaaaacttcccaagggcacggtttcatttcattcccattcagatcaccgttttctgggcacggtagaaaaagaagccactttttccaatcctaaaaccactagcccaaataaaggcaaagagaaggaggctgaggatggcattattgcttatgatgactgtggggtgaaactgactattgcttttcaagccaaggatgtggaaggatctacttctcctcaaataggagataaggttgaatttagtattagtgacaaacagaggcctggacagcaggttgcaacttgtgtgcgacttttaggtcgtaattctaactccaagaggctcttgggttatgtggcaactctgaaggataattttggatttattgaaacagccaatcatgataaggaaatctttttccattacagtgagttctctggtgatgttgatagcctggaactgggggacatggtcgagtatagcttgtccaaaggcaaaggcaacaaagtcagtgcagaaaaagtgaacaaaacacactcagtgaatggcattactgaggaagctgatcccaccatttactctggcaaagtaattcgccccctgaggagtgttgatccaacacagactgagtaccaaggaatgattgagattgtggaggagggcgatatgaaaggtgaggtctatccatttggcatcgttgggatggccaacaaaggggattgcctgcagaaaggggagagcgtcaagttccaattgtgtgtcctgggccaaaatgcacaaactatggcttacaacatcacacccctgcgcagggccacagtggaatgtgtgaaagatcagtttggcttcattaactatgaagtaggagatagcaagaagctctttttccatgtgaaagaagttcaggatggcattgagctacaggcaggagatgaggtggagttctcagtgattcttaatcagcgcactggcaagtgcagcgcctgtaatgtttggcgagtctgtgagggccccaaggctgttgcagctcctcgacctgatcggttggtcaatcgcttgaagaatatcactctggatgatgccagtgctcctcgcctaatggttcttcgtcagccaaggggaccagataactcaatggggtttggtgcagaaagaaagatccgtcaagctggtgtcattgactaaccacatccacaaagcacaccattaatccactatgatcaagttggggggaatctggtgaagggttctgaatatctccctcttcatccctcccgaaatctggaatacttattctattgagctattacaccagttttaacaccttcctcgtgttatgtttaaaaaaataaataaatttaagaaaaccattttaaataatgcacagttgcagcctggaaaaacttaaggtggcgccttatagtatcaattttaggagctttatttggtgcatttaacgcaactggtaattgcagaatccactttgcctgtgtaagtgaaaaatatagactgttatcttgttggccctatgaaattctgcacttttcattatatactctaccttcattaattacttctggcaagatgttctgccttagcactcagttgcattcttttcctttttcttcctgttcattatgctttaattctgaggaccatatgagggtagaatatattatcttttaaaaattacaaaaatttgtataggcaaaccatttcttaaagttgatggccaaattttaaaatgttatttttcatatcatttataatcttgtcacaatccacttaaagaagtttggttatatttcagtgaaaattttcttccagagtaggttttttttcgtgggttggggggtaactttactacaattagtaagtatggtgcagaatttcatgcaaatgaggagtgccagcagtgtgataatttaaacatatttaaacaaaaacaaaaaaaatgaatgcacaaacttgctgctgcttagatcactgcagcttctaggacccggtttcttttactgatttaaaaacaaaacaaaaaaaaa

SEQ ID NO: 4626 - DNA, 4167 bp, Homo sapiens
  source 1..4167: mol_type = genomic DNA
cagactttaccacctgaaactgctgcttcaagttcagatcaggcaaggaacaaacctcgtaacaactaacaagaccaaagaagagtacacttaagttgaagacacaacacttgatctgaaacaagaagtttgtgcctactcaacagctttgaaagagcacttcccaacgctgctagtagtctttgttttcttcagtgctgtactgtgagattgcccggtacagcagcagttgtattctttattagcttggtagatcattttctctcgctcttttttttaatactagcaactttcatcctttgaaacgtgtgctgaaaaagaagaatcagcaaatactactgaaagtgcaatatttgagtatcactgcgagctgtttgagatggagaacgtttttactgtgtcatcagatcctcatccctctcctgcagcccctccttcactttctttacccttatcttcatcttctacctcatctgggactaaaaaacaaaagaggaccccaacttatcagagatctatgagctttgatccaaaccttctccacaacaatggacataatgggtaccctaatggtacttcagcagcactgcgtgaaactggggttattgaaaaactgttaacctcttacggatttattcagtgttcagaacgtcaagctagacttttcttccactgttcacagtataatggcaacctgcaagacttaaaagtaggagatgatgttgaatttgaagtatcatcggaccgacggactgggaaacccattgctgttaaactggtgaagataaaacaagaaatcctccctgaagaacgaatgaatggacaagttgtgtgcgctgttcctcacaacttagagagtaaatctccagctgccccgggtcagagtccaacagggagtgtatgctacgaacgtaatggggaagtgttttatctgacttacacccctgaagatgtcgaagggaacgttcagctggaaactggagataaaataaactttgtaattgataacaataaacatactggtgctgtaagtgctcgcaacattatgctgttgaaaaagaaacaagcccgctgtcagggagtagtttgtgccatgaaggaggcatttggctttattgaaagaggtgatgttgtaaaagagatattctttcactatagtgaatttaagggtgacttagaaaccttacagcctggcgatgatgtggaattcacaatcaaggacagaaatggtaaagaagttgcaacagatgtcagactattgcctcaaggaacagtcatttttgaagatatcagcattgaacattttgaaggaactgtaaccaaagttatcccaaaagtacccagtaaaaaccagaatgacccattgccaggacgcatcaaagttgactttgtgatccctaaagaacttccctttggagacaaagatacgaaatccaaggtgaccctgctggaaggtgaccatgttaggtttaatatttcaacagaccgacgtgacaaattagagcgagcaaccaatatagaagttctgtcaaatacatttcagttcactaatgaagcccgagaaatgggtgtgattgctgccatgagagatggttttggtttcatcaagtgtgtggatcgtgatgttcgtatgttcttccacttcagtgaaattctggatgggaaccagctccatattgcagatgaagtagagtttactgtggttcctgatatgctctctgctcaaagaaatcatgctattaggattaaaaaacttcccaagggcacggtttcatttcattcccattcagatcaccgttttctgggcacggtagaaaaagaagccactttttccaatcctaaaaccactagcccaaataaaggcaaagagaaggaggctgaggatggcattattgcttatgatgactgtggggtgaaactgactattgcttttcaagccaaggatgtggaaggatctacttctcctcaaataggagataaggttgaatttagtattagtgacaaacagaggcctggacagcaggttgcaacttgtgtgcgacttttaggtcgtaattctaactccaagaggctcttgggttatgtggcaactctgaaggataattttggatttattgaaacagccaatcatgataaggaaatctttttccattacagtgagttctctggtgatgttgatagcctggaactgggggacatggtcgagtatagcttgtccaaaggcaaaggcaacaaagtcagtgcagaaaaagtgaacaaaacacactcagtgaatggcattactgaggaagctgatcccaccatttactctggcaaagtaattcgccccctgaggagtgttgatccaacacagactgagtaccaaggaatgattgagattgtggaggagggcgatatgaaaggtgaggtctatccatttggcatcgttgggatggccaacaaaggggattgcctgcagaaaggggagagcgtcaagttccaattgtgtgtcctgggccaaaatgcacaaactatggcttacaacatcacacccctgcgcagggccacagtggaatgtgtgaaagatcagtttggcttcattaactatgaagtaggagatagcaagaagctctttttccatgtgaaagaagttcaggatggcattgagctacaggcaggagatgaggtggagttctcagtgattcttaatcagcgcactggcaagtgcagcgcctgtaatgtttggcgagtctgtgagggccccaaggctgttgcagctcctcgacctgatcggttggtcaatcgcttgaagaatatcactctggatgatgccagtgctcctcgcctaatggttcttcgtcagccaaggggaccagataactcaatggggtttggtgcagaaagaaagatccgtcaagctggtgtcattgactaaccacatccacaaagcacaccattaatccactatgatcaagttggggggaatctggtgaagggttctgaatatctccctcttcatccctcccgaaatctggaatacttattctattgagctattacaccagttttaacaccttcctcgtgttatgtttaaaaaaataaataaatttaagaaaaccattttaaataatgcacagttgcagcctggaaaaacttaaggtggcgccttatagtatcaattttaggagctttatttggtgcatttaacgcaactggtaattgcagaatccactttgcctgtgtaagtgaaaaatatagactgttatcttgttggccctatgaaattctgcacttttcattatatactctaccttcattaattacttctggcaagatgttctgccttagcactcagttgcattcttttcctttttcttcctgttcattatgctttaattctgaggaccatatgagggtagaatatattatcttttaaaaattacaaaaatttgtataggcaaaccatttcttaaagttgatggccaaattttaaaatgttatttttcatatcatttataatcttgtcacaatccacttaaagaagtttggttatatttcagtgaaaattttcttccagagtaggttttttttcgtgggttggggggtaactttactacaattagtaagtatggtgcagaatttcatgcaaatgaggagtgccagcagtgtgataatttaaacatatttaaacaaaaacaaaaaaaatgaatgcacaaacttgctgctgcttagatcactgcagcttctaggacccggtttcttttactgatttaaaaacaaaacaaaaaaaaataaaaaagttgtgcctgaaatgaatcttgtttttttttataagtagccgcctggttactgtgtcctgtaaaatacagacacttgacccttggtgtagcttctgttcaactttatatcacgggaatggatgggtctgatttcttggccctcttcttgaattggccatatacagggtccctggccagtggactgaaggctttgtctaagatgacaagggtcagctcaggggatgtgggggagggcggttttatcttcccccttgtcgtttgaggttttgatctctgggtaaagaggccgtttatctttgtaaacacgaaacatttttgctttctccagttttctgttaatggcgaaagaatggaagcgaataaagttttactgatttttgagacacta

SEQ ID NO: 4627 - DNA, 626 bp, Homo sapiens
  source 1..626: mol_type = genomic DNA
attggatgaatcatctctttgctcttatttcaaccttttaattactgatccaccctctttgattacctgacacaacaggaatatctttcgtaacttgaaagtatgaagtgtaacagaacagactttaccacctgaaactgctgcttcaagttcagatcaggcaaggaacaaacctcgtaacaactaacaagaccaaagaagagtacacttaagttgaagacacaacacttgatctgaaacaagaagtttgtgcctactcaacagctttgaaagagcacttcccaacgctgctagtagtctttgttttcttcagtgctgtactgtgagattgcccggtacagcagcagttgtattctttattagcttggtagatcattttctctcgctcttttttttaatactagcaactttcatcctttgaaacgtgtgctgaaaaagaagaatcagcaaatactactgaaagtgcaatatttgagtatcactgcgagatgagctttgatccaaaccttctccacaacaatggacataatgggtaccctaatggtacttcagcagcactgcgtgaaactggggttattgaaaaactgttaacctcttacggatttattcagtgttcagaacgtcaa

SEQ ID NO: 4628 - DNA, 503 bp, Homo sapiens
  source 1..503: mol_type = genomic DNA
attcctacgtaccgggccgtgctgcttatggcggcgctggagagggggcgctgagctgttgggtatgaagtgtaacagaacagactttaccacctgaaactgctgcttcaagttcagatcaggcaaggaacaaacctcgtaacaactaacaagaccaaagaagagtacacttaagttgaagacacaacacttgatctgaaacaagaagtttgtgcctactcaacagctttgaaagagcacttcccaacgctgctagtagtctttgttttcttcagtgctgtactgtgagattgcccggtacagcagcagttgtattctttattagcttggtagatcattttctctcgctcttttttttaatactagcaactttcatcctttgaaacgtgtgctgaaaaagaagaatcagcaaatactactgaaagtgcaatatttgagtatcactgcgagatatgtatatattctttttctttttaaaacagatgagctttgatccaaacctt

SEQ ID NO: 4629 - DNA, 3459 bp, Homo sapiens
  source 1..3459: mol_type = genomic DNA
gcgcccggagcccgcaactctcgcgagagaagcgagatttattcctacgtaccgggccgtgctgcttatggcggcgctggagagggggcgctgagctgttgggtatgaagtgtaacagaacagactttaccacctgaaactgctgcttcaagttcagatcaggcaaggaacaaacctcgtaacaactaacaagaccaaagaagagtacacttaagttgaagacacaacacttgatctgaaacaagaagtttgtgcctactcaacagctttgaaagagcacttcccaacgctgctagtagtctttgttttcttcagtgctgtactgtgagattgcccggtacagcagcagttgtattctttattagcttggtagatcattttctctcgctcttttttttaatactagcaactttcatcctttgaaacgtgtgctgaaaaagaagaatcagcaaatactactgaaagtgcaatatttgagtatcactgcgagatgatgttgaatttgaagtatcatcggaccgacggactgggaaacccattgctgttaaactggtgaagataaaacaagaaatcctccctgaagaacgaatgaatggacaagaagtgttttatctgacttacacccctgaagatgtcgaagggaacgttcagctggaaactggagataaaataaactttgtaattgataacaataaacatactggtgctgtaagtgctcgcaacattatgctgttgaaaaagaaacaagcccgctgtcagggagtagtttgtgccatgaaggaggcatttggctttattgaaagaggtgatgttgtaaaagagatattctttcactatagtgaatttaagggtgacttagaaaccttacagcctggcgatgatgtggaattcacaatcaaggacagaaatggtaaagaagttgcaacagatgtcagactattgcctcaaggaacagtcatttttgaagatatcagcattgaacattttgaaggaactgtaaccaaagttatcccaaaagtacccagtaaaaaccagaatgacccattgccaggacgcatcaaagttgactttgtgatccctaaagaacttccctttggagacaaagatacgaaatccaaggtgaccctgctggaaggtgaccatgttaggtttaatatttcaacagaccgacgtgacaaattagagcgagcaaccaatatagaagttctgtcaaatacatttcagttcactaatgaagcccgagaaatgggtgtgattgctgccatgagagatggttttggtttcatcaagtgtgtggatcgtgatgttcgtatgttcttccacttcagtgaaattctggatgggaaccagctccatattgcagatgaagtagagtttactgtggttcctgatatgctctctgctcaaagaaatcatgctattaggattaaaaaacttcccaagggcacggtttcatttcattcccattcagatcaccgttttctgggcacggtagaaaaagaagccactttttccaatcctaaaaccactagcccaaataaaggcaaagagaaggaggctgaggatggcattattgcttatgatgactgtggggtgaaactgactattgcttttcaagccaaggatgtggaaggatctacttctcctcaaataggagataaggttgaatttagtattagtgacaaacagaggcctggacagcaggttgcaacttgtgtgcgacttttaggtcgtaattctaactccaagaggctcttgggttatgtggcaactctgaaggataattttggatttattgaaacagccaatcatgataaggaaatctttttccattacagtgagttctctggtgatgttgatagcctggaactgggggacatggtcgagtatagcttgtccaaaggcaaaggcaacaaagtcagtgcagaaaaagtgaacaaaacacactcagtgaatggcattactgaggaagctgatcccaccatttactctggcaaagtaattcgccccctgaggagtgttgatccaacacagactgagtaccaaggaatgattgagattgtggaggagggcgatatgaaaggtgaggtctatccatttggcatcgttgggatggccaacaaaggggattgcctgcagaaaggggagagcgtcaagttccaattgtgtgtcctgggccaaaatgcacaaactatggcttacaacatcacacccctgcgcagggccacagtggaatgtgtgaaagatcagtttggcttcattaactatgaagtaggagatagcaagaagctctttttccatgtgaaagaagttcaggatggcattgagctacaggcaggagatgaggtggagttctcagtgattcttaatcagcgcactggcaagtgcagcgcctgtaatgtttggcgagtctgtgagggccccaaggctgttgcagctcctcgacctgatcggttggtcaatcgcttgaagaatatcactctggatgatgccagtgctcctcgcctaatggttcttcgtcagccaaggggaccagataactcaatggggtttggtgcagaaagaaagatccgtcaagctggtgtcattgactaaccacatccacaaagcacaccattaatccactatgatcaagttggggggaatctggtgaagggttctgaatatctccctcttcatccctcccgaaatctggaatacttattctattgagctattacaccagttttaacaccttcctcgtgttatgtttaaaaaaataaataaatttaagaaaaccattttaaataatgcacagttgcagcctggaaaaacttaaggtggcgccttatagtatcaattttaggagctttatttggtgcatttaacgcaactggtaattgcagaatccactttgcctgtgtaagtgaaaaatatagactgttatcttgttggccctatgaaattctgcacttttcattatatactctaccttcattaattacttctggcaagatgttctgccttagcactcagttgcattcttttcctttttcttcctgttcattatgctttaattctgaggaccatatgagggtagaatatattatcttttaaaaattacaaaaatttgtataggcaaaccatttcttaaagttgatggccaaattttaaaatgttatttttcatatcatttataatcttgtcacaatccacttaaagaagtttggttatatttcagtgaaaattttcttccagagtaggttttttttcgtgggttggggggtaactttactacaattagtaagtatggtgcagaatttcatgcaaatgaggagtgccagcagtgtgataatttaaacatatttaaacaaaaacaaaaaaaatgaatgcacaaacttgctgctgcttagatcactgcagcttctaggacccggtttcttttactgatttaaaaacaaaacaaaaaaaaataaaaaa

SEQ ID NO: 4630 - DNA, 601 bp, Homo sapiens
  source 1..601: mol_type = genomic DNA
agatgtgggaactattgagcttacttttcatccctagcaaaaaccccagagccagtgaataaataacttggcagactagctcatgatagcataatggtcaatatggagaaatgttggatggatagcagttagtaagagactgattttagagaagtctccaggtgtatgctgccagatgctatcctcgccctgcttttttcagagacctaatgagtagttctgtgagtacctatgtgctacgtaagcacttattttaggctttttacgtgcagcaactcatttaaccatctcaacaactctgtgagacaggtgttaagatgagctttgatccaaaccttctccacaacaatggacataatgggtaccctaatggtacttcagcagcactgcgtgaaactggggttattgaaaaactgttaacctcttacggatttattcagtgttcagaacgtcaagctagacttttcttccactgttcacagtataatggcaacctgcaagacttaaaagtaggagatgatgttgaatttgaagtatcatcggaccgacggactgggaaacccattgctgttaaactggtgaagataaaacaagaaatcct

SEQ ID NO: 4631 - DNA, 2667 bp, Homo sapiens
  source 1..2667: mol_type = genomic DNA
tacgtaccgggccgtgctgcttatggcggcgctggagagggggcgctgagctgttgggatgagctttgatccaaaccttctccacaacaatggacataatgggtaccctaatggtacttcagcagcactgcgtgaaactggggttattgaaaaactgttaacctcttacggatttattcagtgttcagaacgtcaagctagacttttcttccactgttcacagtataatggcaacctgcaagacttaaaagtaggagatgatgttgaatttgaagtatcatcggaccgacggactgggaaacccattgctgttaaactggtgaagataaaacaagaaatcctccctgaagaacgaatgaatggacaagttgtgtgcgctgttcctcacaacttagagagtaaatctccagctgccccgggtcagagtccaacagggagtgtatgctacgaacgtaatggggaagtgttttatctgacttacacccctgaagatgtcgaagggaacgttcagctggaaactggagataaaataaactttgtaattgataacaataaacatactggtgctgtaagtgctcgcaacattatgctgttgaaaaagaaacaagcccgctgtcagggagtagtttgtgccatgaaggaggcatttggctttattgaaagaggtgatgttgtaaaagagatattctttcactatagtgaatttaagggtgacttagaaaccttacagcctggcgatgatgtggaattcacaatcaaggacagaaatggtaaagaagttgcaacagatgtcagactattgcctcaaggaacagtcatttttgaagatatcagcattgaacattttgaaggaactgtaaccaaagttatcccaaaagtacccagtaaaaaccagaatgacccattgccaggacgcatcaaagttgactttgtgatccctaaagaacttccctttggagacaaagatacgaaatccaaggtgaccctgctggaaggtgaccatgttaggtttaatatttcaacagaccgacgtgacaaattagagcgagcaaccaatatagaagttctgtcaaatacatttcagttcactaatgaagcccgagaaatgggtgtgattgctgccatgagagatggttttggtttcatcaagtgtgtggatcgtgatgttcgtatgttcttccacttcagtgaaattctggatgggaaccagctccatattgcagatgaagtagagtttactgtggttcctgatatgctctctgctcaaagaaatcatgctattaggattaaaaaacttcccaagggcacggtttcatttcattcccattcagatcaccgttttctgggcacggtagaaaaagaagccactttttccaatcctaaaaccactagcccaaataaaggcaaagagaaggaggctgaggatggcattattgcttatgatgactgtggggtgaaactgactattgcttttcaagccaaggatgtggaaggatctacttctcctcaaataggagataaggttgaatttagtattagtgacaaacagaggcctggacagcaggttgcaacttgtgtgcgacttttaggtcgtaattctaactccaagaggctcttgggttatgtggcaactctgaaggataattttggatttattgaaacagccaatcatgataaggaaatctttttccattacagtgagttctctggtgatgttgatagcctggaactgggggacatggtcgagtatagcttgtccaaaggcaaaggcaacaaagtcagtgcagaaaaagtgaacaaaacacactcagtgaatggcattactgaggaagctgatcccaccatttactctggcaaagtaattcgccccctgaggagtgttgatccaacacagactgagtaccaaggaatgattgagattgtggaggagggcgatatgaaaggtgaggtctatccatttggcatcgttgggatggccaacaaaggggattgcctgcagaaaggggagagcgtcaagttccaattgtgtgtcctgggccaaaatgcacaaactatggcttacaacatcacacccctgcgcagggccacagtggaatgtgtgaaagatcagtttggcttcattaactatgaagtaggagatagcaagaagctctttttccatgtgaaagaagttcaggatggcattgagctacaggcaggagatgaggtggagttctcagtgattcttaatcagcgcactggcaagtgcagcgcctgtaatgtttggcgagtctgtgagggccccaaggctgttgcagctcctcgacctgatcggttggtcaatcgcttgaagaatatcactctggatgatgccagtgctcctcgcctaatggttcttcgtcagccaaggggaccagataactcaatggggtttggtgcagaaagaaagatccgtcaagctggtgtcattgactaaccacatccacaaagcacaccattaatccactatgatcaagttggggggaatctggtgaagggttctgaatatctccctcttcatccctcccgaaatctggaatacttattctattgagctattacaccagttttaacaccttcctcgtgttatgtttaaaaaaataaataaatttaagaaaaccattttaaataatgcacagttgcagcctg

SEQ ID NO: 4632 - protein, 255 aa, Homo sapiens
MAAAVAAAPGALGSLHAGGARLVAACSAWLCPGLRLPGSLAGRRAGPAIWAQGWVPAAGGPAPKRGYSSEMKTEDELRVRHLEEENRGIVVLGINRAYGKNSLSKNLIKMLSKAVDALKSDKKVRTIIIRSEVPGIFCAGADLKERAKMSSSEVGPFVSKIRAVINDIANLPVPTIAAIDGLALGGGLELALACDIRVAASSAKMGLVETKLAIIPGGVTSSTEVLNPSKSSMKIGIIIFQTPVNIDILASSHES

SEQ ID NO: 4633 - protein, 310 aa, Homo sapiens
MAAAVAAAPGALGSLHAGGARLVAACSAWLCPGLRLPGSLAGRRAGPAIWAQGWVPAAGGPAPKRGYSSEMKTEDELRVRHLEEENRGIVVLGINRAYGKNSLSKNLIKMLSKAVDALKSDKKVRTIIIRSEVPGIFCAANLPVPTIAAIDGLALGGGLELALACDIRVAASSAKMGLVETKLAIIPGGGGTQRLPRAIGMSLAKELIFSARVLDGKEAKAVGLISHVLEQNQEGDAAYRKALDLAREFLPQGPVAMRVAKLAINQGMEVDLVTGLAIEEACYAQTIPTKDRLEGLLAFKEKRPPRYKGE

SEQ ID NO: 4634 - protein, 339 aa, Homo sapiens
MAAAVAAAPGALGSLHAGGARLVAACSAWLCPGLRLPGSLAGRRAGPAIWAQGWVPAAGGPAPKRGYSSEMKTEDELRVRHLEEENRGIVVLGINRAYGKNSLSKNLIKMLSKAVDALKSDKKVRTIIIRSEVPGIFCAGADLKERAKMSSSEVGPFVSKIRAVINDIANLPVPTIAAIDGLALGGGLELALACDIRVAASSAKMGLVETKLAIIPGGGGTQRLPRAIGMSLAKELIFSARVLDGKEAKAVGLISHVLEQNQEGDAAYRKALDLAREFLPQGPVAMRVAKLAINQGMEVDLVTGLAIEEACYAQTIPTKDRLEGLLAFKEKRPPRYKGE

SEQ ID NO: 4635 - protein, 172 aa, Homo sapiens
MASDEGKLFVGGLSFDTNEQSLEQVFSKYGQISEVVVVKDRETQRSRGFGFVTFENIDDAKDAMMAMNGKSVDGRQIRVDQAGKSSDNRSRGYRGGSAGGRGFFRGGRGRGRGFSRGGGDRGYGGNRFESRSGGYGGSRDYYSSRSQSGGYSDRSSGGSYRDSYDSYATHNE

SEQ ID NO: 4636 - protein, 244 aa, Homo sapiens
MSSRWSRSSQSTDRSLKSVDGRQIRVDQAGKSSDNRSRGYRGGSAGGRGFFRGGRGRGRGFSRGGGDRGYGGNRFESRSGGYGGSRDYYSSRSQSGGYSDRSSGGSYRDSYDSYGKSHSEGATLLWPAVGARFTLVPSPSTLGWTLRPCHCACPEEAHLSSQSHFYRRTQKPNETDQKGKGERGPAGQSARCMCGRRPASLGCGGWLLPGRRPRPGLASGVKLPLVASVPLHCACFLSSATHNE

SEQ ID NO: 4637 - protein, 263 aa, Homo sapiens
MASDEGKLFVGGLSFDTNEQSLEQVFSKYGQISEVVVVKDRETQRSRGFGFVTFENIDDAKDAMMAMNGKSVDGRQIRVDQAGGGDRGYGGNRFESRSGGYGGSRDYYSSRSQSGGYSDRSSGGSYRDSYDSYGKSHSEGATLLWPAVGARFTLVPSPSTLGWTLRPCHCACPEEAHLSSQSHFYRRTQKPNETDQKGKGERGPAGQSARCMCGRRPASLGCGGWLLPGRRPRPGLASGVKLPLVASVPLHCACFLSSATHNE

SEQ ID NO: 4638 - protein, 153 aa, Homo sapiens
MTSESTSPPVVPPLHSPKSPVWPTFPFHREGSRVWERGGVPPRDLPSPLPTKRTRTYSATARASAGPVFKGVCKQFSRSQGHGFITPENGSEDIFVHVSDIEGEYVPVEGDEVTYKMCPIPPKNQKFQAVEVVLTQLAPHTPHETWSGQVVGS

SEQ ID NO: 4639 - protein, 303 aa, Homo sapiens
MSEEQFGGDGAAAAATAAASGGTEGGSAESEGAKIDASKNEEDEGKMFIGGLSWDTTKKDLKDYFSKFGEVVDCTLKLDPITGRSRGFGFVLFKESESVDKVMDQKEHKLNGKVIDPKRAKAMKTKEPVKKIFVGGLSPDTPEEKIREYFGGFGEVESIELPMDNKTNKRRGFCFITFKEEEPVKKIMEKKYHNVGLSKCEIKVAMSKEQYQQQQQWGSRGGFAGRARGRGGGPSQNWNQGYSNYWNQGYGNYGYNSQGYGGYGGYDYTGYNNYYGYGDYSNQQSGYGKVSRRGGHQNSYKPY

SEQ ID NO: 4640 - protein, 355 aa, Homo sapiens
MSEEQFGGDGAAAAATAAVGGSAGEQEGAMVAATQGAAAAAGSGAGTGGGTASGGTEGGSAESEGAKIDASKNEEDEGHSNSSPRHSEAATAQREEWKMFIGGLSWDTTKKDLKDYFSKFGEVVDCTLKLDPITGRSRGFGFVLFKESESVDKVMDQKEHKLNGKVIDPKRAKAMKTKEPVKKIFVGGLSPDTPEEKIREYFGGFGEVESIELPMDNKTNKRRGFCFITFKEEEPVKKIMEKKYHNVGLSKCEIKVAMSKEQYQQQQQWGSRGGFAGRARGRGGGPSQNWNQGYSNYWNQGYGNYGYNSQGYGGYGGYDYTGYNNYYGYGDYSNQQSGYGKVSRRGGHQNSYKPY

SEQ ID NO: 4641 - protein, 201 aa, Homo sapiens
MDQKEHKLNGKVIDPKRAKAMKTKEPVKKIFVGGLSPDTPEEKIREYFGGFGEVESIELPMDNKTNKRRGFCFITFKEEEPVKKIMEKKYHNVGLSKCEIKVAMSKEQYQQQQQWGSRGGFAGRARGRGGGPSQNWNQGYSNYWNQGYGNYGYNSQGYGGYGGYDYTGYNNYYGYGDYSNQQSGYGKVSRRGGHQNSYKPY

SEQ ID NO: 4642 - protein, 155 aa, Homo sapiens
MSEEQFGGDGAAAAATAAVGGSAGEQEGAMVAATQGAAAAAGSGAGTGGGTASGGTEGGSAESEGAKIDASKNEEDEGKMFIGGLSWDTTKKDLKDYFSKFGEVVDCTLKLDPITGRSRGFGFVLFKESESVDKVMDQKEHKLNGKVIDPKRAKA

SEQ ID NO: 4643 - protein, 221 aa, Homo sapiens
MSEEQFGGDGAAAAATAAVGGSAGEQEGAMVAATQGAAAAAGSGAGTGGGTASGGTEGGSAESEGAKIDASKNEEDEGHSNSSPRHSEAATAQREEWKMFIGGLSWDTTKKDLKDYFSKFGEVVDCTLKLDPITGRSRGFGFVLFKESESVDKVMDQKEHKLNGKVIDPKRAKAMKTKEPVKKIFVGGLSPDTPEEKIREYFGGFGEVESIELPMDNKTNK

SEQ ID NO: 4644 - protein, 306 aa, Homo sapiens
MSEEQFGGDGAAAAATAAVGGSAGEQEGAMVAATQGAAAAAGSGAGTGGGTASGGTEGGSAESEGAKIDASKNEEDEGHSNSSPRHSEAATAQREEWKMFIGGLSWDTTKKDLKDYFSKFGEVVDCTLKLDPITGRSRGFGFVLFKESESVDKVMDQKEHKLNGKVIDPKRAKAMKTKEPVKKIFVGGLSPDTPEEKIREYFGGFGEVESIELPMDNKTNKRRGFCFITFKEEEPVKKIMEKKYHNVGLSKCEIKVAMSKEQYQQQQQWGSRGGFAGRARGRGGDQQSGYGKVSRRGGHQNSYKPY

SEQ ID NO: 4645 - protein, 210 aa, Homo sapiens
  VARIANT 1: note = misc_feature - Xaa can be any naturally occurring amino acid
XKMFIGGLSWDTTKKDLKDYFSKFGEVVDCTLKLDPITGRSRGFGFVLFKESESVDKVMDQKEHKLNGKVIDPKRAKAMKTKEPVKKIFVGGLSPDTPEEKIREYFGGFGEVESIELPMDNKTNKRRGFCFITFKEEEPVKKIMEKKYHNVGLSKCEIKVAMSKEQYQQQQQWGSRGGFAGRARGRGGDQQSGYGKVSRRGGHQNSYKPY

SEQ ID NO: 4646 - protein, 336 aa, Homo sapiens
MSEEQFGGDGAAAAATAAVGGSAGEQEGAMVAATQGAAAAAGSGAGTGGGTASGGTEGGSAESEGAKIDASKNEEDEGKMFIGGLSWDTTKKDLKDYFSKFGEVVDCTLKLDPITGRSRGFGFVLFKESESVDKVMDQKEHKLNGKVIDPKRAKAMKTKEPVKKIFVGGLSPDTPEEKIREYFGGFGEVESIELPMDNKTNKRRGFCFITFKEEEPVKKIMEKKYHNVGLSKCEIKVAMSKEQYQQQQQWGSRGGFAGRARGRGGGPSQNWNQGYSNYWNQGYGNYGYNSQGYGGYGGYDYTGYNNYYGYGDYSNQQSGYGKVSRRGGHQNSYKPY

SEQ ID NO: 4647 - protein, 281 aa, Homo sapiens
MSEEQFGGDGAAGNGGGRRAGEQEGAMVAATQGAAAREAEPGPGAEPRLEAPKGAESEGAKIDASKNEEDEGKMFIGGLSWDTTKKDLKDYFSKFGEVVDCTLKLDPITGRSRGFGFVLFKESESVDKVMDQKEHKLNGKVIDPKRAKAMKTKEPVKKIFVGGLSPDTPEEKIREYFGGFGEVESIELPMDNKTNKRRGFCFITFKEEEPVKKIMEKKYHNVGLSKCEIKVAMSKEQYQQQQQWGSRGGFAGRARGRGGDQQSGYGKVSRRGGHQNSYKPY

SEQ ID NO: 4648 - protein, 577 aa, Homo sapiens
MNKLYIGNLNESVTPADLEKVFAEHKISYSGQFLVKSGYAFVDCPDEHWAMKAIETFSGKVELQGKRLEIEHSVPKKQRSRKIQIRNIPPQLRWEVLDSLLAQYGTVENCEQVNTESETAVVNVTYSNREQTRQAIMKLNGHQLENHALKVSYIPDEQIAQGPENGRRGGFGSRGQPRQGSPVAAGAPAKQQQVDIPLRLLVPTQYVGAIIGKEGATIRNITKQTQSKIDVHRKENAGAAEKAISVHSTPEGCSSACKMILEIMHKEAKDTKTADEVPLKILAHNNFVGRLIGKEGRNLKKVEQDTETKITISSLQDLTLYNPERTITVKGAIENCCRAEQEIMKKVREAYENDVAAMSLQSHLIPGLNLAAVGLFPASSSAVPPPPSSVTGAAPYSSFMQAPEQEMVQVFIPAQAVGAIIGKKGQHIKQLSRFASASIKIAPPETPDSKVRMVIITGPPEAQFKAQGRIYGKLKEENFFGPKEEVKLETHIRVPASAAGRVIGKGGKTVNELQNLTAAEVVVPRDQTPDENDQVIVKIIGHFYASQMAQRKIRDILAQVKQQHQKGQSNQAQARRK

SEQ ID NO: 4649 - protein, 599 aa, Homo sapiens
MMNKLYIGNLSPAVTADDLRQLFGDRKLPLAGQVLLKSGYAFVDYPDQNWAIRAIETLSGKVELHGKIMEVDYSVSKKLRSRKIQIRNIPPHLQWEVLDGLLAQYGTVENVEQVNTDTETAVVNVTYATREEAKIAMEKLSGHQFENYSFKISYIPDEEVSSPSPPQRAQRGDHSSREQGHAPGGTSQARQIDFPLRILVPTQFVGAIIGKEGLTIKNITKQTQSRVDIHRKENSGAAEKPVTIHATPEGTSEACRMILEIMQKEADETKLAEEIPLKILAHNGLVGRLIGKEGRNLKKIEHETGTKITISSLQDLSIYNPERTITVKGTVEACASAEIEIMKKLREAFENDMLAVNQQANLIPGLNLSALGIFSTGLSVLSPPAGPRGAPPAAPYHPFTTHSGYFSSLYPHHQFGPFPHHHSYPEQEIVNLFIPTQAVGAIIGKKGAHIKQLARFAGASIKIAPAEGPDVSERMVIITGPPEAQFKAQGRIFGKLKEENFFNPKEEVKLEAHIRVPSSTAGRVIGKGGKTVNELQNLTSAEVIVPRDQTPDENEEVIVRIIGHFFASQTAQRKIREIVQQVKQQEQKYPQGVASQRSK

SEQ ID NO: 4650 - protein, 542 aa, Homo sapiens
MFSCPGHYHVDGFLNPGSRKIQIRNIPPHLQWEVLDGLLAQYGTVENVEQVFAFSLVNTDTETAVVNVTYATREEAKIAMEKLSGHQFENYSFKISYIPDEEVSSPSPPQRAQRGDHSSREQGHAPGGTSQARQIDFPLRILVPTQFVGAIIGKEGLTIKNITKQTQSRVDIHRKENSGAAEKPVTIHATPEGTSEACRMILEIMQKEADETKLAEEIPLKILAHNGLVGRLIGKEGRNLKKIEHETGTKITISSLQDLSIYNPERTITVKGTVEACASAEIEIMKKLREAFENDMLAVNQQANLIPGLNLSALGIFSTGLSVLSPPAGPRGAPPAAPYHPFTTHSGYFSSLYPHHQFGPFPHHHSYPEQEIVNLFIPTQAVGAIIGKKGAHIKQLARFAGASIKIAPAEGPDVSERMVIITGPPEAQFKAQGRIFGKLKEENFFNPKEEVKLEAHIRVPSSTAGRVIGKGGKTVNELQNLTSAEVIVPRDQTPDENEEVIVRIIGHFFASQTAQRKIREIVQQVKQQEQKYPQGVASQRSK

SEQ ID NO: 4651 - protein, 556 aa, Homo sapiens
MMNKLYIGNLSPAVTADDLRQLFGDRKLPLAGQVLLKSGYAFVDYPDQNWAIRAIETLSGKVELHGKIMEVDYSVSKKLRSRKIQIRNIPPHLQWEVLDGLLAQYGTVENVEQVNTDTETAVVNVTYATREEAKIAMEKLSGHQFENYSFKISYIPDEEVSSPSPPQRAQRGDHSSREQGHAPGGTSQARQIDFPLRILVPTQFVGAIIGKEGLTIKNITKQTQSRVDIHRKENSGAAEKPVTIHATPEGTSEACRMILEIMQKEADETKLAEEIPLKILAHNGLVGRLIGKEGRNLKKIEHETGTKITISSLQDLSIYNPERTITVKGTVEACASAEIEIMKKLREAFENDMLAVNTHSGYFSSLYPHHQFGPFPHHHSYPEQEIVNLFIPTQAVGAIIGKKGAHIKQLARFAGASIKIAPAEGPDVSERMVIITGPPEAQFKAQGRIFGKLKEENFFNPKEEVKLEAHIRVPSSTAGRVIGKGGKTVNELQNLTSAEVIVPRDQTPDENEEVIVRIIGHFFASQTAQRKIREIVQQVKQQEQKYPQGVASQRSK

SEQ ID NO: 4652 - protein, 579 aa, Homo sapiens
MNKLYIGNLSENAAPSDLESIFKDAKIPVSGPFLVKTGYAFVDCPDESWALKAIEALSGKIELHGKPIEVEHSVPKRQRIRKLQIRNIPPHLQWEVLDSLLVQYGVVESCEQVNTDSETAVVNVTYSSKDQARQALDKLNGFQLENFTLKVAYIPDEMAAQQNPLQQPRGRRGLGQRGSSRQGSPGSVSKQKPCDLPLRLLVPTQFVGAIIGKEGATIRNITKQTQSKIDVHRKENAGAAEKSITILSTPEGTSAACKSILEIMHKEAQDIKFTEEIPLKILAHNNFVGRLIGKEGRNLKKIEQDTDTKITISPLQELTLYNPERTITVKGNVETCAKAEEEIMKKIRESYENDIASMNLQAHLIPGLNLNALGLFPPTSGMPPPTSGPPSAMTPPYPQFEQSETETVHLFIPALSVGAIIGKQGQHIKQLSRFAGASIKIAPAEAPDAKVRMVIITGPPEAQFKAQGRIYGKIKEENFVSPKEEVKLEAHIRVPSFAAGRVIGKGGKTVNELQNLSSAEVVVPRDQTPDENDQVVVKITGHFYACQVAQRKIQEILTQVKQHQQQKALQSGPPQSRRK

SEQ ID NO: 4653 - protein, 443 aa, Homo sapiens
MQRRDDPAARMSRSSGRSGSMDPSGAHPSVRQTPSRQPPLPHRSRGGGGGSRGGARASPATQPPPLLPPSATGPDATVGGPAPTPLLPPSATASVKMEPENKYLPELMAEKDSLDPSFTHAMQLLTAEIEKIQKGDSKKDDEENYLDLFSHKNMKLKERVLIPVKQYPKFNFVGKILGPQGNTIKRLQEETGAKISVLGKGSMRDKAKEEELRKGGDPKYAHLNMDLHVFIEVFGPPCEAYALMAHAMEEVKKFLVPDMMDDICQEQFLELSYLNGVPEPSRGRGVPVRGRGAAPPPPPVPRGRGVGPPRGALVRGTPVRGAITRGATVTRGVPPPPTVRGAPAPRARTAGIQRIPLPPPPAPETYEEYGYDDTYAEQSYEGYEGYYSQSQGDSEYYDYGHGEVQDSYEAYGQDDWNGTRPSLKAPPARPVKGAYREHPYGRY

SEQ ID NO: 4654 - protein, 404 aa, Homo sapiens
MQRRDDPAARMSRSSGRSGSMDPSGAHPSVRQTPSRQPPLPHRSRGGGGGSRGGARASPATQPPPLLPPSATGPDATVGGPAPTPLLPPSATASVKMEPENKYLPELMAEKDSLDPSFTHAMQLLTAEIEKIQKGDSKKDDEENYLDLFSHKNMKLKERVLIPVKQYPKEEELRKGGDPKYAHLNMDLHVFIEVFGPPCEAYALMAHAMEEVKKFLVPDMMDDICQEQFLELSYLNGVPEPSRGRGVPVRGRGAAPPPPPVPRGRGVGPPRGALVRGTPVRGAITRGATVTRGVPPPPTVRGAPAPRARTAGIQRIPLPPPPAPETYEEYGYDDTYAEQSYEGYEGYYSQSQGDSEYYDYGHGEVQDSYEAYGQDDWNGTRPSLKAPPARPVKGAYREHPYGRY

SEQ ID NO: 4655 - protein, 419 aa, Homo sapiens
MQRRDDPAARMSRSSGRSGSMDPSGAHPSVRQTPSRQPPPPLLPPSATGPDATVGGPAPTPLLPPSATASVKMEPENKYLPELMAEKDSLDPSFTHAMQLLTAEIEKIQKGDSKKDDEENYLDLFSHKNMKLKERVLIPVKQYPKFNFVGKILGPQGNTIKRLQEETGAKISVLGKGSMRDKAKEEELRKGGDPKYAHLNMDLHVFIEVFGPPCEAYALMAHAMEEVKKFLVPDMMDDICQEQFLELSYLNGVPEPSRGRGVPVRGRGAAPPPPPVPRGRGVGPPRGALVRGTPVRGAITRGATVTRGVPPPPTVRGAPAPRARTAGIQRIPLPPPPAPETYEEYGYDDTYAEQSYEGYEGYYSQSQGDSEYYDYGHGEVQDSYEAYGQDDWNGTRPSLKAPPARPVKGAYREHPYGRY

SEQ ID NO: 4656 - protein, 349 aa, Homo sapiens
MEEEKYLPELMAEKDSLDPSFVHASRLLAEEIEKFQGSDGKKEDEEKKYLDVISNKNIKLSERVLIPVKQYPKFNFVGKLLGPRGNSLKRLQEETGAKMSILGKGSMRDKAKEEELRKSGEAKYAHLSDELHVLIEVFAPPGEAYSRMSHALEEIKKFLVPDYNDEIRQEQLRELSYLNGSEDSGRGRGIRGRGIRIAPTAPSRGRGGAIPPPPPPGRGVLTPRGSTVTRGALPVPPVARGVPTPRARGAPTVPGYRAPPPPAHEAYEEYGYDDGYGGEYDDQTYETYDNSYATQTQSVPEYYDYGHGVSEDAYDSYAPEEWATTRSSLKAPPQRSARGGYREHPYGRY

SEQ ID NO: 4657 - protein, 316 aa, Homo sapiens
MEEEKYLPELMAEKDSLDPSFVHASRLLAEEIEKFQGSDGKKEDEEKKYLDVISNKNIKLSERVLIPVKQYPKFNFVGKLLGPRGNSLKRLQEETGAKMSILGKGSMRDKAKEEELRKSGEAKYAHLSDELHVLIEVFAPPGEAYSRMSHALEEIKKFLVPDYNDEIRQEQLRELSYLNGSEDSGRGRGIRGRGIRIAPTAPSRGRGGAIPPPPPPGRGVLTPRGSTVTRGALPVPPVARGVPTPRARGAPTVPGYRAPPPPAHEAYEEYPSLPLSLFFDTVAKSHQHCDNEVPQTGSTRLNPGRSFFLAWRWEWD

SEQ ID NO: 4658 - protein, 346 aa, Homo sapiens
MEEKYLPELMAEKDSLDPSFTHALRLVNQEIEKFQKGEGKDEEKYIDVVINKNMKLGQKVLIPVKQFPKFNFVGKLLGPRGNSLKRLQEETLTKMSILGKGSMRDKAKEEELRKSGEAKYFHLNDDLHVLIEVFAPPAEAYARMGHALEEIKKFLIPDYNDEIRQAQLQELTYLNGGSENADVPVVRGKPTLRTRGVPAPAITRGRGGVTARPVGVVVPRGTPTPRGVLSTRGPVSRGRGLLTPRARGVPPTGYRPPPPPPTQETYGEYDYDDGYGTAYDEQSYDSYDNSYSTPAQSGADYYDYGHGLSEETYDSYGQEEWTNSRHKAPSARTAKGVYRDQPYGRY

SEQ ID NO: 4659 - protein, 341 aa, Homo sapiens
MVGEMETKEKPKPTPDYLMQLMNDKKLMSSLPNFCGIFNHLERLLDEEISRVRKDMYNDTLNGSTEKRSAELPDAVGPIVQLQEKLYVPVKEYPDFNFVGRILGPRGLTAKQLEAETGCKIMVRGKGSMRDKKKEEQNRGKPNWEHLNEDLHVLITVEDAQNRAEIKLKRAVEEVKKLLVPAAEGEDSLKKMQLMELAILNGTYRDANIKSPALAFSLAATAQAAPRIITGPAPVLPPAALRTPTPAGPTIMPLIRQIQTAVMPNGTPHPTAAIVPPGPEAGLIYTPYEYPYTLAPATSILEYPIEPSGVLGAVATKVRRHDMRVHPYQRIVTADRAATGN

SEQ ID NO: 4660 - protein, 325 aa, Homo sapiens
MVGEMETKEKPKPTPDYLMQLMNDKKLMSSLPNFCGIFNHLERLLDEEISRVRKDMYNDTLNGSTEKRSAELPDAVGPIVQLQEKLYVPVKEYPDFNFVGRILGPRGLTAKQLEAETGCKIMVRGKGSMRDKKKEEQNRGKPNWEHLNEDLHVLITVEDAQNRAEIKLKRAVEEVKKLLVPAAEGEDSLKKMQLMELAILNGTYRDANIKSPALAFSLAATAQAAPRIITGPAPVLPPAALRTPTPAGPTIMPLIRQIQTAVMPNGTPHPTAAIVPPGPEAGLIYTPYEYPYTLAPATSILEYPIEPSGVLEWIEMPVMPDISAH

SEQ ID NO: 4661 - protein, 319 aa, Homo sapiens
MVGEMETKEKPKPTPDYLMQLMNDKKLMSSLPNFCGIFNHLERLLDEEISRVRKDMYNDTLNGSTEKRSAELPDAVGPIVQLQEKLYVPVKEYPDFNFVGRILGPRGLTAKQLEAETGCKIMVRGKGSMRDKKKEEQNRGKPNWEHLNEDLHVLITVEDAQNRAEIKLKRAVEEVKKLLVPAAEGEDSLKKMQLMELAILNGTYRDANIKSPALAFSLAATAQAAPRIITGPAPVLPPAALRTPTPAGPTIMPLIRQIQTAVMPNGTPHPTAAIVPPGPEAGLIYTPYEYPYTLAPATSILEYPIEPSGVLGKFFSPWG

SEQ ID NO: 4662 - protein, 333 aa, Homo sapiens
MVGEMETKEKPKPTPDYLMQLMNDKKLMSSLPNFCGIFNHLERLLDEEISRVRKDMYNDTLNGSTEKRSAELPDAVGPIVQLQEKLYVPVKEYPDFNFVGRILGPRGLTAKQLEAETGCKIMVRGKGSMRDKKKEEQNRGKPNWEHLNEDLHVLITVEDAQNRAEIKLKRAVEEVKKLLVPAAEGEDSLKKMQLMELAILNGTYRDANIKSPTAQAAPRIITGPAPVLPPAALRTPTPAGPTIMPLIRQIQTAVMPNGTPHPTAAIVPPGPEAGLIYTPYEYPYTLAPATSILEYPIEPSGVLGAVATKVRRHDMRVHPYQRIVTADRAATGN

SEQ ID NO: 4663 - protein, 319 aa, Homo sapiens
MVGEMETKEKPKPTPDYLMQLMNDKKLMSSLPNFCGIFNHLERLLDEEISRVRKDMYNDTLNGSTEKRSAELPDAVGPIVQLQEKLYVPVKEYPDFNFVGRILGPRGLTAKQLEAETGCKIMVRGKGSMRDKKKEEQNRGKPNWEHLNEDLHVLITVEDAQNRAEIKLKRAVEEVKKLLVPAAEGEDSLKKMQLMELAILNGTYRDANIKSPALAFSLAATAQAAPRIITGPAPVLPPAALRTPTPAGPTIMPLIRQIQTAVMPNGTPHPTAAIVPPGPEAGLIYTPYEYPYTLAPATSILEYPIEPSGVLGMAFPTKG

SEQ ID NO: 4664 - protein, 85 aa, Homo sapiens
MTGKTQTSNVTNKNDPKSINSRVFIGNLNTAIVKKVDIEAIFSKYGKIVGCSVHKGYAFVQYMSERHARAAVAGENARVIAGQPL

SEQ ID NO: 4665 - protein, 218 aa, Homo sapiens
MTMYKSKRRHQRYINMAGEPKPYRPKPGNKRPLSALYRLESKEPFLSVGGYVFDYDYYRDDFYNRLFDYHGRVPPPPRAVIPLKRPRVAVTTTRRGKGVFSMKGGSRSTASGSTGSKLKSDELQTIKKELTQIKTKIDSLLGRLEKIEKQQKAEAEAQKKQLEESLVLIQEECVSEIADHSTEEPAEGGPDADGEEMTDGIEEDFDEDGGHELFLQIK

SEQ ID NO: 4666 - protein, 291 aa, Homo sapiens
MTGKTQTSNVTNKNDPKSINSRVFIGNLNTAIVKKVDIEAIFSKYGKIVGCSVHKGYAFVQYMSERHARAAVAGENARVIAGQPLDINMAGEPKPYRPKPGNKRPLSALYRLESKEPFLSVGGYVFDYDYYRDDFYNRLFDYHGRVPPPPRAVIPLKRPRVAVTTTRRGKGVFSMKGGSRSTASGSTGSKLKSDELQTIKKELTQIKTKIDSLLGRLEKIEKQQKAEAEAQKKQLEESLVLIQEECVSEIADHSTEEPAEGGPDADGEEMTDGIEEDFDEDGGHELFLQIK

SEQ ID NO: 4667 - protein, 291 aa, Homo sapiens; identical to SEQ ID NO: 4666

SEQ ID NO: 4668 - protein, 85 aa, Homo sapiens; identical to SEQ ID NO: 4664

SEQ ID NO: 4669 - protein, 291 aa, Homo sapiens; identical to SEQ ID NO: 4666

SEQ ID NO: 4670 - protein, 387 aa, Homo sapiens
MVPKGATMLVIPPGLSEEEEALQKKFNKLKKKKKALLALKKQSSSSTTSQGGVKRSLSEQPVMDTATATEQAKQLVKSGAISAIKAETKNSGFKRSRTLEGKLKDPEKGPVPTFQPFQRSISADDDLQESSRRPQRKSLYESFVSSSDRLRELGPDGEEAEGPGAGDGPPRSFDWGYEERSGAHSSASPPRSRSRDRSHERNRDRDRDRERDRDRDRDRDRERDRDRDRDRDRDRERDRDRERDRDRDREGPFRRSDSFPERRAPRKGNTLYVYGEDMTPTLLRGAFSPFGNIIDLSMDPPRNCAFVTYEKMESADQAVAELNGTQVESVQLKVNIARKQPMLDAATGKSVWGSLAVQNSPKGCHRDKRTQIVYSDDVYKENLVDGF

SEQ ID NO: 4671 - protein, 350 aa, Homo sapiens
MLVIPPGLSEEEEALQKKFNKLKKKKKALLALKKQSSSSTTSQGGVKRSLSEQPVMDTATATEQAKQLVKSGAISAIKAETKNSGFKRSRTLEGKLKDPEKGPVPTFQPFQRSISADDDLQESSRRPQRKSLYESFDWGYEERSGAHSSASPPRSRSRDRSHERNRDRDRDRERDRDRDRDRDRERDRDRDRDRDRDRERDRDRERDRDRDREGPFRRSDSFPERRAPRKGNTLYVYGEDMTPTLLRGAFSPFGNIIDLSMDPPRNCAFVTYEKMESADQAVAELNGTQVESVQLKVNIARKQPMLDAATGKSVWGSLAVQNSPKGCHRDKRTQIVYSDDVYKENLVDGF

SEQ ID NO: 4672 - protein, 334 aa, Homo sapiens [sequence omitted]

SEQ ID NO: 4673 - protein, 380 aa, Homo sapiens
MLVIPPGLSEEEEALQKKFNKLKKKKKALLALKKQSSSSTTSQGGVKRSLSEQPVMDTATATEQAKQLVKSGAISAIKAETKNSGFKRSRTLEGKLKDPEKGPVPTFQPFQRSISADDDLQESSRRPQRKSLYESFVSSSDRLRELGPDGEEAEGPGAGDGPPRSFDWGYEERSGAHSSASPPRSRSRDRSHERNRDRDRDRERDRDRDRDRDRERDRDRDRDRDRDRERDRDRERDRDRDREGPFRRSDSFPERRAPRKGNTLYVYGEDMTPTLLRGAFSPFGNIIDLSMDPPRNCAFVTYEKMESADQAVAELNGTQVESVQLKVNIARKQPMLDAATGKSVWGSLAVQNSPKGCHRDKRTQIVYSDDVYKENLVDGF

SEQ ID NO: 4674 - protein, 159 aa, Homo sapiens
MLVIPPGLSEEEEALQKKFNKLKKKKKALLALKKQSSSSTTSQGGVKRSLSEQPVMDTATATEQAKQLVKSGAISAIKAETKNSGFKRSRTLEGKLKDPEKGPVPTFQPFQRSISADDDLQESSRRPQRKSLYESFVSSSDRLRELGPDGEEAEGPGAG

SEQ ID NO: 4675 - protein, 294 aa, Homo sapiens [sequence omitted]

SEQ ID NO: 4676 - protein, 294 aa, Homo sapiens [sequence omitted]

SEQ ID NO: 4677 - protein, 240 aa, Homo sapiens
MLVIPPGLSEEEEALQKKFNKLKKKKKALLALKKQSSSSTTSQGGVKRSLSEQPVMDTATATEQAKQLVKSGAISAIKAETKNSGFKRSRTLEGKLKDPEKGPVPTFQPFQRSISADDDLQESSRRPQRKSLYESDRLRELGPDGEEAEGPGAGDGPPRSFDWGYEERSGAHSSASPPRSRSRDRSHERNRDRDRDRERDRDRDRDRDRERDRDRDRDRDRDRERDRDRERDRDRDREGP

SEQ ID NO: 4678 - protein, 334 aa, Homo sapiens [sequence omitted]

SEQ ID NO: 4679 - protein, 380 aa, Homo sapiens; identical to SEQ ID NO: 4673

SEQ ID NO: 4680 - protein, 387 aa, Homo sapiens; identical to SEQ ID NO: 4670

SEQ ID NO: 4681 - protein, 159 aa, Homo sapiens; identical to SEQ ID NO: 4674

SEQ ID NO: 4682 - protein, 387 aa, Homo sapiens; identical to SEQ ID NO: 4670

SEQ ID NO: 4683 - protein, 294 aa, Homo sapiens [sequence omitted]

SEQ ID NO: 4684 - protein, 240 aa, Homo sapiens; identical to SEQ ID NO: 4677

SEQ ID NO: 4685 - protein, 380 aa, Homo sapiens; identical to SEQ ID NO: 4673

SEQ ID NO: 4686 - protein, 159 aa, Homo sapiens; identical to SEQ ID NO: 4674

SEQ ID NO: 4687 - protein, 334 aa, Homo sapiens [sequence omitted]

SEQ ID NO: 4688 - protein, 387 aa, Homo sapiens; identical to SEQ ID NO: 4670

SEQ ID NO: 4689 - protein, 380 aa, Homo sapiens; identical to SEQ ID NO: 4673

SEQ ID NO: 4690 - protein, 334 aa, Homo sapiens [sequence omitted]

SEQ ID NO: 4691 - protein, 240 aa, Homo sapiens; identical to SEQ ID NO: 4677

SEQ ID NO: 4692 - protein, 159 aa, Homo sapiens; identical to SEQ ID NO: 4674

SEQ ID NO: 4693 - protein, 294 aa, Homo sapiens [sequence omitted]

SEQ ID NO: 4694 - protein, 334 aa, Homo sapiens [sequence omitted]

SEQ ID NO: 4695 - protein, 387 aa, Homo sapiens; identical to SEQ ID NO: 4670

SEQ ID NO: 4696 - protein, 380 aa, Homo sapiens; identical to SEQ ID NO: 4673

SEQ ID NO: 4697 - protein, 294 aa, Homo sapiens [sequence omitted]

SEQ ID NO: 4698 - protein, 240 aa, Homo sapiens; identical to SEQ ID NO: 4677

SEQ ID NO: 4699 - protein, 159 aa, Homo sapiens; identical to SEQ ID NO: 4674

SEQ ID NO: 4700 - protein, 294 aa, Homo sapiens [sequence omitted]

SEQ ID NO: 4701 - protein, 334 aa, Homo sapiens [sequence omitted]

SEQ ID NO: 4702 - protein, 380 aa, Homo sapiens; identical to SEQ ID NO: 4673

SEQ ID NO: 4703 - protein, 387 aa, Homo sapiens; identical to SEQ ID NO: 4670

SEQ ID NO: 4704 - protein, 159 aa, Homo sapiens; identical to SEQ ID NO: 4674

SEQ ID NO: 4705 - protein, 240 aa, Homo sapiens; identical to SEQ ID NO: 4677

SEQ ID NO: 4706 - protein, 169 aa, Homo sapiens
MAPRTWCPAGIFGLFCPLTLACSSLTIALTDCQPIILVSPTLSLWMVVRSVWIMQASLLGEPEEVALGPMGVVAATLEVVGTRAMGVAGIMTVDLEGMDMDMDVPETIMAETRVVMTATQEEITETIMTTEMRHAHNIDTQGIISDPGSSFQMAVFIKVFGAAPKHLIL

SEQ ID NO: 4707 - protein, 157 aa, Homo sapiens
MSSEEGKLFVGGLNFNTDEQALEDHFSSFGPISEVVVVKDRETQRSRGFGFITFTNPEHASVAMRAMNGESLDGRQIRVDHAGKSARGTRGGGFGAHGRGRSYSRGGGDQGYGSGRYYDSRPGGYGYGYGRSRDYNGRNQGGYDRYSGGNYRDNYDN

SEQ ID NO: 4708 - protein, 157 aa, Homo sapiens; identical to SEQ ID NO: 4707

SEQ ID NO: 4709 - protein, 155 aa, Homo sapiens
MAPRTWCPAGIFGLFCPLTLACSSLTIALTDCQPIILVSPTLSLWMVVRSVWIMQASLLGEPEEVALGPMGVVAATLEVVGTRAMGVAGIMTVDLEGMDMDMDVPETIMAETRVVMTATQEEITETIMTTEMRHAHNIGETWISALSEPVCHTLS

SEQ ID NO: 4710 - protein, 930 aa, Homo sapiens
MEYERRGGRGDRTGRYGATDRSQDDGGENRSRDHDYRDMDYRSYPREYGSQEGKHDYDDSSEEQSAEDSYEASPGSETQRRRRRRHRHSPTGPPGFPRDGDYRDQDYRTEQGEEEEEEEDEEEEEKASNIVMLRMLPQAATEDDIRGQLQSHGVQAREVRLMRNKSSGQSRGFAFVEFSHLQDATRWMEANQHSLNILGQKVSMHYSDPKPKINEDWLCNKCGVQNFKRREKCFKCGVPKSEAEQKLPLGTRLDQQTLPLGGRELSQGLLPLPQPYQAQGVLASQALSQGSEPSSENANDTIILRNLNPHSTMDSILGALAPYAVLSSSNVRVIKDKQTQLNRGFAFIQLSTIVEAAQLLQILQALHPPLTIDGKTINVEFAKGSKRDMASNEGSRISAASVASTAIAAAQWAISQASQGGEGTWATSEEPPVDYSYYQQDEGYGNSQGTESSLYAHGYLKGTKGPGITGTKGDPTGAGPEASLEPGADSVSMQAFSRAQPGAAPGIYQQSAEASSSQGTAANSQSYTIMSPAVLKSELQSPTHPSSALPPATSPTAQESYSQYPVPDVSTYQYDETSGYYYDPQTGLYYDPNSQYYYNAQSQQYLYWDGERRTYVPALEQSADGHKETGAPSKEGKEKKEKHKTKTAQQIAKDMERWARSLNKQKENFKNSFQPISSLRDDERRESATADAGYAILEKKGALAERQHTSMDLPKLASDDRPSPPRGLVAAYSGESDSEEEQERGGPEREEKLTDWQKLACLLCRRQFPSKEALIRHQQLSGLHKQNLEIHRRAHLSENELEALEKNDMEQMKYRDRAAERREKYGIPEPPEPKRRKYGGISTASVDFEQPTRDGLGSDNIGSRMLQAMGWKEGSGLGRKKQGIVTPIEAQTRVRGSGLGARGSSYGVTSTESYKETLHKTMVTRFNEAQ

SEQ ID NO: 4711 - protein, 852 aa, Homo sapiens
MEYERRGGRGDRTGRYGATDRSQDDGGENRSRDHDYRDMDYRSYPREYGSQEGKHDYDDSSEEQSAEIRGQLQSHGVQAREVRLMRNKSSGQSRGFAFVEFSHLQDATRWMEANQHSLNILGQKVSMHYSDPKPKINEDWLCNKCGVQNFKRREKCFKCGVPKSEAEQKLPLGTRLDQQTLPLGGRELSQGLLPLPQPYQAQGVLASQALSQGSEPSSENANDTIILRNLNPHSTMDSILGALAPYAVLSSSNVRVIKDKQTQLNRGFAFIQLSTIEAAQLLQILQALHPPLTIDGKTINVEFAKGSKRDMASNEGSRISAASVASTAIAAAQWAISQASQGGEGTWATSEEPPVDYSYYQQDEGYGNSQGTESSLYAHGYLKGTKGPGITGTKGDPTGAGPEASLEPGADSVSMQAFSRAQPGAAPGIYQQSAEASSSQGTAANSQSYTIMSPAVLKSELQSPTHPSSALPPATSPTAQESYSQYPVPDVSTYQYDETSGYYYDPQTGLYYDPNSQYYYNAQSQQYLYWDGERRTYVPALEQSADGHKETGAPSKEGKEKKEKHKTKTAQQIAKDMERWARSLNKQKENFKNSFQPISSLRDDERRESATADAGYAILEKKGALAERQHTSMDLPKLASDDRPSPPRGLVAAYSGESDSEEEQERGGPEREEKLTDWQKLACLLCRRQFPSKEALIRHQQLSGLHKQNLEIHRRAHLSENELEALEKNDMEQMKYRDRAAERREKYGIPEPPEPKRRKYGGISTASVDFEQPTRDGLGSDNIGSRMLQAMGWKEGSGLGRKKQGIVTPIEAQTRVRGSGLGARGSSYGVTSTESYKETLHKTMVTRFNEAQ

SEQ ID NO: 4712 - protein, 853 aa, Homo sapiens
MEYERRGGRGDRTGRYGATDRSQDDGGENRSRDHDYRDMDYRSYPREYGSQEGKHDYDDSSEEQSAEIRGQLQSHGVQAREVRLMRNKSSGQSRGFAFVEFSHLQDATRWMEANQHSLNILGQKVSMHYSDPKPKINEDWLCNKCGVQNFKRREKCFKCGVPKSEAEQKLPLGTRLDQQTLPLGGRELSQGLLPLPQPYQAQGVLASQALSQGSEPSSENANDTIILRNLNPHSTMDSILGALAPYAVLSSSNVRVIKDKQTQLNRGFAFIQLSTIVEAAQLLQILQALHPPLTIDGKTINVEFAKGSKRDMASNEGSRISAASVASTAIAAAQWAISQASQGGEGTWATSEEPPVDYSYYQQDEGYGNSQGTESSLYAHGYLKGTKGPGITGTKGDPTGAGPEASLEPGADSVSMQAFSRAQPGAAPGIYQQSAEASSSQGTAANSQSYTIMSPAVLKSELQSPTHPSSALPPATSPTAQESYSQYPVPDVSTYQYDETSGYYYDPQTGLYYDPNSQYYYNAQSQQYLYWDGERRTYVPALEQSADGHKETGAPSKEGKEKKEKHKTKTAQQIAKDMERWARSLNKQKENFKNSFQPISSLRDDERRESATADAGYAILEKKGALAERQHTSMDLPKLASDDRPSPPRGLVAAYSGESDSEEEQERGGPEREEKLTDWQKLACLLCRRQFPSKEALIRHQQLSGLHKQNLEIHRRAHLSENELEALEKNDMEQMKYRDRAAERREKYGIPEPPEPKRRKYGGISTASVDFEQPTRDGLGSDNIGSRMLQAMGWKEGSGLGRKKQGIVTPIEAQTRVRGSGLGARGSSYGVTSTESYKETLHKTMVTRFNEAQ

SEQ ID NO: 4713 - protein, 281 aa, Homo sapiens
MFPAQEEADRTVFVGNLEARVREEILYELFLQAGPLTKVTICKDREGKPKSFGFVCFKHPESVSYAIALLNGIRLYGRPINVQYRFGSSRSSEPANQSFESCVKINSHNYRNEEMLVGRSSFPMQYFPINNTSLPQEYFLFQKMQWHVYNPVLQLPYYEMTAPLPNSASVSSSLNHVPDLEAGPSSYKWTHQQPSDSDLYQMTAPLPNSASVSSSLNHVPDLEAGPSSYKWTHQQPSDSDLYQMNKRKRQKQTSDSDSSTDNNRGNECSQKFRKSKKKKRY

SEQ ID NO: 4714 - protein, 932 aa, Homo sapiens
MAVVIRLQGLPIVAGTMDIRHFFSGLTIPDGGVHIVGGELGEAFIVFATDEDARLGMMRTGGTIKGSKVTLLLSSKTEMQNMIELSRRRFETANLDIPPANASRSGPPPSSGMSSRVNLPTTVSNFNNPSPSVVTATTSVHESNKNIQTFSTASVGTAPPNMGASFGSPTFSSTVPSTASPMNTVPPPPIPPIPAMPSLPPMPSIPPIPVPPPVPTLPPVPPVPPIPPVPSVPPMTPLPPMSGMPPLNPPPVAPLPAGMNGSGAPMNLNNNLNPMFLGPLNPVNPIQMNSQSSVKPLPINPDDLYVSVHGMPFSAMENDVRDFFHGLRVDAVHLLKDHVGRNNGNGLVKFLSPQDTFEALKRNRMLMIQRYVEVSPATERQWVAAGGHITFKQNMGPSGQTHPPPQTLPRSKSPSGQKRSRSRSPHEAGFCVYLKGLPFEAENKHVIDFFKKLDIVEDSIYIAYGPNGKATGEGFVEFRNEADYKAALCRHKQYMGNRFIQVHPITKKGMLEKIDMIRKRLQNFSYDQREMILNPEGDVNSAKVCAHITNIPFSITKMDVLQFLEGIPVDENAVHVLVDNNGQGLGQALVQFKNEDDARKSERLHRKKLNGREAFVHVVTLEDMREIEKNPPAQGKKGLKMPVPGNPAVPGMPNAGLPGVGLPSAGLPGAGLPSTGLPGSAITSAGLPGAGMPSAGIPSAGGEEHAFLTVGSKEANNGPPFNFPGNFGGSNAFGPPIPPPGLGGGAFGDARPGMPSVGNSGLPGLGLDVPGFGGGPNNLSGPSGFGGGPQNFGNGPGSLGGPPGFGSGPPGLGSAPGHLGGPPAFGPGPGPGPGPGPIHIGGPPGFASSSGKPGPTVIKVQNMPFTVSIDEILDFFYGYQVIPGSVCLKYNEKGMPTGEAMVAFESRDEATAAVIDLNDRPIGSRKVKLVLG

SEQ ID NO: 4715 - protein, 932 aa, Homo sapiens; identical to SEQ ID NO: 4714

SEQ ID NO: 4716 - protein, 932 aa, Homo sapiens; identical to SEQ ID NO: 4714

SEQ ID NO: 4717 - protein, 143 aa, Homo sapiens
MAVVIRLQGLPIVAGTMDIRHFFSGLTIPDGGVHIVGGELGEAFIVFATDEDARLGMMRTGGTIKGSKVTLLLSSKTEMQNMIELSRRRFETANLDIPPANASRSGPPPSSGMSSRVNLPTTVSNFNNPSPSVVTATTSVHES

SEQ ID NO: 4718 - protein, 291 aa, Homo sapiens
MAVVIRLQGLPIVAGTMDIRHFFSGLTIPDGGVHIVGGELGEAFIVFATDEDARLGMMRTGGTIKGSKVTLLLSSKTEMQNMIELSRRRFETANLDIPPANASRSGPPPSSGMSSRVNLPTTVSNFNNPSPSVVTATTSVHESNKNIQTFSTASVGTAPPNMGASFGSPTFSSTVPSTASPMNTVPPPPIPPIPAMPSLPPMPSIPPIPVPPPVPTLPPVPPVPPIPPVPSVPPMTPLPPMSGMPPLNPPPVAPLPAGMNGSGAPMNLNNNLNPMFLGPLNPVNPIQMNSQ

SEQ ID NO: 4719 - protein, 134 aa, Homo sapiens
MAVVIRLQGLPIVAGTMDIRHFFSGLTIPDGGVHIVGGELGEAFIVFATDEDARLGMMRTGGTIKGSKVTLLLSSKTEMQNMIELSRRRFETANLDIPPANASRSGPPPSSGMSSRVNLPTTVSNFNNPSPSVV

SEQ ID NO: 4720 - protein, 731 aa, Homo sapiens
MPSIPPIPVPPPVPTLPPVPPVPPIPPVPSVPPMTPLPPMSGMPPLNPPPVAPLPAGMNGSGAPMNLNNNLNPMFLGPLNPVNPIQMNSQSSVKPLPINPDDLYVSVHGMPFSAMENDVRDFFHGLRVDAVHLLKDHVGRNNGNGLVKFLSPQDTFEALKRNRMLMIQRYVEVSPATERQWVAAGGHITFKQNMGPSGQTHPPPQTLPRSKSPSGQKRSRSRSPHEAGFCVYLKGLPFEAENKHVIDFFKKLDIVEDSIYIAYGPNGKATGEGFVEFRNEADYKAALCRHKQYMGNRFIQVHPITKKGMLEKIDMIRKRLQNFSYDQREMILNPEGDVNSAKVCAHITNIPFSITKMDVLQFLEGIPVDENAVHVLVDNNGQGLGQALVQFKNEDDARKSERLHRKKLNGREAFVHVVTLEDMREIEKNPPAQGKKGLKMPVPGNPAVPGMPNAGLPGVGLPSAGLPGAGLPSTGLPGSAITSAGLPGAGMPSAGIPSAGGEEHAFLTVGSKEANNGPPFNFPGNFGGSNAFGPPIPPPGLGGGAFGDARPGMPSVGNSGLPGLGLDVPGFGGGPNNLSGPSGFGGGPQNFGNGPGSLGGPPGFGSGPPGLGSAPGHLGGPPAFGPGPGPGPGPGPIHIGGPPGFASSSGKPGPTVIKVQNMPFTVSIDEILDFFYGYQVIPGSVCLKYNEKGMPTGEAMVAFESRDEATAAVIDLNDRPIGSRKVKLVLG

SEQ ID NO: 4721 - protein, 143 aa, Homo sapiens
MAVVIRLLGLPFIAGPVDIRHFFTGLTIPDGGVHIIGGEIGEAFIIFATDEDARRAISRSGGFIKDSSVELFLSSKAEMQKTIEMKRTDRVGRGRPGSGTSGVDSLSNFIESVKEEASNSGYGSSINQDAGFHTNGTGHGNLR

SEQ ID NO: 4722 - protein, 1001 aa, Homo sapiens
MAVVIRLLGLPFIAGPVDIRHFFTGLTIPDGGVHIIGGEIGEAFIIFATDEDARRAISRSGGFIKDSSVELFLSSKAEMQKTIEMKRTDRVGRGRPGSGTSGVDSLSNFIESVKEEASNSGYGSSINQDAGFHTNGTGHGNLRPRKTRPLKAENPYLFLRGLPYLVNEDDVRVFFSGLCVDGVIFLKHHDGRNNGDAIVKFASCVDASGGLKCHRSFMGSRFIEVMQGSEQQWIEFGGNAVKEGDVLRRSEEHSPPRGINDRHFRKRSHSKSPRRTRSRSPLGFYVHLKNLSLSIDERDLRNFFRGTDLTDEQIRFLYKDENRTRYAFVMFKTLKDYNTALSLHKTVLQYRPVHIDPISRKQMLKFIARYEKKRSGSLERDRPGHVSQKYSQEGNSGQKLCIYIRNFPFDVTKVEVQKFFADFLLAEDDIYLLYDDKGVGLGEALVKFKSEEQAMKAERLNRRRFLGTEVLLRLISEAQIQEFGVNFSVMSSEKMQARSQSRERGDHSHLFDSKDPPIYSVGAFENFRHQLEDLRQLDNFKHPQRDFRQPDRHPPEDFRHSSEDFRFPPEDFRHSPEDFRRPREEDFRRPSEEDFRRPWEEDFRRPPEDDFRHPREEDWRRPLEEDWRRPLEEDFRRSPTEDFRQLPEEDFRQPPEEDLRWLPEEDFRRPPEEDWRRPPEEDFRRPLQGEWRRPPEDDFRRPPEEDFRHSPEEDFRQSPQEHFRRPPQEHFRRPPPEHFRRPPPEHFRRPPPEHFRRPPPEHFRRPPPEHFRRPPPEHFRRPPQEHFRRPPQEHFRRSREEDFRHPPDEDFRGPPDEDFRHPPDEDFRSPQEEDFRCPSDEDFRQLPEEDLREAPEEDPRLPDNFRPPGEDFRSPPDDFRSHRPFVNFGRPEGGKFDFGKHNMGSFPEGRFMPDPKINCGSGRVTPIKIMNLPFKANVNEILDFFHGYRIIPDSVSIQYNEQGLPTGEAIVAMINYNEAMAAIKDLNDRPVGPRKVKLTLL

SEQ ID NO: 4723 - protein, 122 aa, Homo sapiens
MAVVIRLLGLPFIAGPVDIRHFFTGLTIPDGGVHIIGGEIGEAFIIFATDEDARRAISRSGGFIKDSSVELFLSSKAEMQKTIEMKRTDRVGRGRPGSGTSGVDSLSNFIESVKEEASNSGY

SEQ ID NO: 4724 - protein, 82 aa, Homo sapiens
MAVVIRLLGLPFIAGPVDIRHFFTGLTIPDGGVHIIGGEIGEAFIIFATDEDARRAISRSGGFIKDSSVELFLSSKAEMQKT

SEQ ID NO: 4725 - protein, 881 aa, Homo sapiens
MAVVIRLLGLPFIAGPVDIRHFFTGLTIPDGGVHIIGGEIGEAFIIFATDEDARRAISRSGGFIKDSSVELFLSSKAEMQKTIEMKRTDRVGRGRPGSGTSGVDSLSNFIESVKEEASNSGYGSSINQDAGFHTNGTGHGNLRPRKTRPLKAENPYLFLRGLPYLVNEDDVRVFFSGLCVDGVIFLKHHDGRNNGDAIVKFASCVDASGGLKCHRSFMGSRFIEVMQGSEQQWIEFGGNAVKEGDVLRRSEEHSPPRGINDRHFRKRSHSKSPRRTRSRSPLGFYVHLKNLSLSIDERDLRNFFRGTDLTDEQIRFLYKDENRTRYAFVMFKTLKDYNTALSLHKTVLQYRPVHIDPISRKQMLKFIARYEKKRSGSLERDRPGHVSQKYSQEGNSGQKLCIYIRNFPFDVTKVEVQKFFADFLLAEDDIYLLYDDKGVGLGEALVKFKSEEQAMKAERLNRRRFLGTEVLLRLISEAQIQEFGVNFSVMSSEKMQARSQSRERGDHSHLFDSKDPPIYSVGAFENFRHQLEDLRQLDNFKHPQRDFRQPDRHPPEDFRHSSEDFRFPPEDFRHSPEDFRRPREEDFRRPSEEDFRRPWEEDFRRPPEDDFRHPREEDWRRPPPEHFRRPPPEHFRRPPPEHFRRPPPEHFRRPPPEHFRRPPQEHFRRPPQEHFRRSREEDFRHPPDEDFRGPPDEDFRHPPDEDFRSPQEEDFRCPSDEDFRQLPEEDLREAPEEDPRLPDNFRPPGEDFRSPPDDFRSHRPFVNFGRPEGGKFDFGKHNMGSFPEGRFMPDPKINCGSGRVTPIKIMNLPFKANVNEILDFFHGYRIIPDSVSIQYNEQGLPTGEAIVAMINYNEAMAAIKDLNDRPVGPRKVKLTLL

SEQ ID NO: 4726 - protein, 149 aa, Homo sapiens
MAVVIRLLGLPFIAGPVDIRHFFTGLTIPDGGVHIIGGEIGEAFIIFATDEDARRAISRSGGFIKDSSVELFLSSKAEMQKTIEMKRTDRVGRGRPGSGTSGVDSLSNFIESVKEEASNSGYGSSINQDAGFHTNGTGHGNLRPRKTRP

SEQ ID NO: 4727 - protein, 669 aa, Homo sapiens
MKIFVGNVDGADTTPEELAALFAPYGTVMSCAVMKQFAFVHMRENAGALRAIEALHGHELRPGRALVVEMSRPRPLNTWKIFVGNVSAACTSQELRSLFERRGRVIECDVVKDYAFVHMEKEADAKAAIAQLNGKEVKGKRINVELSTKGQKKGPGLAVQSGDKTKKPGAGDTAFPGTGGFSATFDYQQAFGNSTGGFDGQARQPTPPFFGRDRSPLRRSPPRASYVAPLTAQPATYRAQPSVSLGAAYRAQPSASLGVGYRTQPMTAQAASYRAQPSVSLGAPYRGQLASPSSQSAAASSLGPYGGAQPSASALSSYGGQAAAASSLNSYGAQGSSLASYGNQPSSYGAQAASSYGVRAAASSYNTQGAASSLGSYGAQAASYGAQSAASSLAYGAQAASYNAQPSASYNAQSAPYAAQQAASYSSQPAAYVAQPATAAAYASQPAAYAAQATTPMAGSYGAQPVVQTQLNSYGAQASMGLSGSYGAQSAAAATGSYGAAAAYGAQPSATLAAPYRTQSSASLAASYAAQQHPQAAASYRGQPGNAYDGAGQPSAAYLSMSQGAVANANSTPPPYERTRLSPPRASYDDPYKKAVAMSKRYGSDRRLAELSDYRRLSESQLSFRRSPTKSSLDYRRLPDAHSDYARYSGSYNDYLRAAQMHSGYQRRM

SEQ ID NO: 4728 - protein, 977 aa, Homo sapiens
MRTAGRDPVPRRSPRWRRAVPLCETSAGRRVTQLRGDDLRRPATMKGKERSPVKAKRSRGGEDSTSRGERSKKLGGSGGSNGSSSGKTDSGGGSRRSLHLDKSSSRGGSREYDTGGGSSSSRLHSYSSPSTKNSSGGGESRSSSRGGGGESRSSGAASSAPGGGDGAEYKTLKISELGSQLSDEAVEDGLFHEFKRFGDVSVKISHLSGSGSGDERVAFVNFRRPEDARAAKHARGRLVLYDRPLKIEAVYVSRRRSRSPLDKDTYPPSASVVGASVGGHRHPPGGGGGQRSLSPGGAALGYRDYRLQQLALGRLPPPPPPPLPRDLERERDYPFYERVRPAYSLEPRVGAGAGAAPFREVDEISPEDDQRANRTLFLGNLDITVTESDLRRAFDRFGVITEVDIKRPSRGQTSTYGFLKFENLDMSHRAKLAMSGKIIIRNPIKIGYGKATPTTRLWVGGLGPWVPLAALAREFDRFGTIRTIDYRKGDSWAYIQYESLDAAHAAWTHMRGFPLGGPDRRLRVDFADTEHRYQQQYLQPLPLTHYELVTDAFGHRAPDPLRGARDRTPPLLYRDRDRDLYPDSDWVPPPPPVRERSTRTAATSVPAYEPLDSLDRRRDGWSLDRDRGDRDLPSSRDQPRKRRLPEESGGRHLDRSPESDRPRKRHCAPSPDRSPELSSSRDRYNSDNDRSSRLLLERPSPIRDRRGSLEKSQGDKRDRKNSASAERDRKHRTTAPTEGKSPLKKEDRSDGSAPSTSTASSKLKSPSQKQDGGTAPVASASPKLCLAWQGMLLLKNSNFPSNMHLLQGDLQVASSLLVEGSTGGKVAQLKITQRLRLDQPKLDEVTRRIKVAGPNGYAILLAVPGSSDSRSSSSSAASDTATSTQRPLRNLVSYLKQKQAAGVISLPVGGNKDKENTGVLHAFPPCEFSQQFLDSPAKALAKSEEDYLVMIIVRGFGFQIGVRYENKKRENLALTLL

SEQ ID NO: 4729 - protein, 890 aa, Homo sapiens
MKRQSERDSSPSGRGSSSSAKRPREREREAEAGGRRAAHKASGGAKHPVPARARDKPRGSGSGGGGHRDGRGTGDANHRASSGRSSGSGAGGGGRGGKASGDPGASGMSPRASPLPPPPPPPGAEPACPGSSAAAPEYKTLLISSLSPALPAEHLEDRLFHQFKRFGEISLRLSHTPELGRVAYVNFRHPQDAREARQHALARQLLLYDRPLKVEPVYLRGGGGSSRRSSSSSAAASTPPPGPPAPADPLGYLPLHGGYQYKQRSLSPVAAPPLREPRARHAAAAFALDAAAAAAVGLSRERALDYYGLYDDRGRPYGYPAVCEEDLMPEDDQRATRNLFIGNLDHSVSEVELRRAFEKYGIIEEVVIKRPARGQGGAYAFLKFQNLDMAHRAKVAMSGRVIGRNPIKIGYGKANPTTRLWVGGLGPNTSLAALAREFDRFGSIRTIDHVKGDSFAYIQYESLDAAQAACAKMRGFPLGGPDRRLRVDFAKAEETRYPQQYQPSPLPVHYELLTDGYTRHRNLDADLVRDRTPPHLLYSDRDRTFLEGDWTSPSKSSDRRNSLEGYSRSVRSRSGERWGADGDRGLPKPWEERRKRRSLSSDRGRTTHSPYEERSRTKGSGQQSERGSDRTPERSRKENHSSEGTKESSSNSLSNSRHGAEERGHHHHHHEAADSSHGKKARDSERNHRTTEAEPKPLEEPKHETKKLKNLSEYAQTLQLGWNGLLVLKNSCFPTSMHILEGDQGVISSLLKDHTSGSKLTQLKIAQRLRLDQPKLDEVTRRIKQGSPNGYAVLLATQATPSGLGTEGMPTVEPGLQRRLLRNLVSYLKQKQAAGVISLPVGGSKGRDGTGMLYAFPPCDFSQQYLQSALRTLGKLEEEHMVIVIVRDTA

SEQ ID NO: 4730 - protein, 254 aa, Homo sapiens
METVVCPPWEERRKRRSLSSDRGRTTHSPYEERSRTKGSGQQSERGSDRTPERSRKENHSSEGTKESSSNSLSNSRHGAEERGHHHHHHEAADSSHGKKARDSERNHRTTEAEPKPLEEPKHETKKLKNLSEYAQTLQLGWNGLLVLKNSCFPTSMHILEGDQGVISSLLKDHTSGSKLTQLKIAQRLRLDQPKLDEVTRRIKQGSPNGYAVLLATQATPSGLGTEGMPTVEPGLQRRLLRNLVSYLKQKQAAG

SEQ ID NO: 4731 - protein, 563 aa, Homo sapiens
MPEDDQRATRNLFIGNLDHSVSEVELRRAFEKYGIIEEVVIKRPARGQGGAYAFLKFQNLDMAHRAKVAMSGRVIGRNPIKIGYGKANPTTRLWVGGLGPNTSLAALAREFDRFGSIRTIDHVKGDSFAYIQYESLDAAQAACAKMRGFPLGGPDRRLRVDFAKAEETRYPQQYQPSPLPVHYELLTDGYTRHRNLDADLVRDRTPPHLLYSDRDRTFLEGDWTSPSKSSDRRNSLEGYSRSVRSRSGERWGADGDRGLPKPWEERRKRRSLSSDRGRTTHSPYEERSRTKGSGQQSERGSDRTPERSRKENHSSEGTKESSSNSLSNSRHGAEERGHHHHHHEAADSSHGKKARDSERNHRTTEAEPKPLEEPKHETKKLKNLSEYAQTLQLGWNGLLVLKNSCFPTSMHILEGDQGVISSLLKDHTSGSKLTQLKIAQRLRLDQPKLDEVTRRIKQGSPNGYAVLLATQATPSGLGTEGMPTVEPGLQRRLLRNLVSYLKQKQAAGVISLPVGGSKGRDGTGMLYAFPPCDFSQQYLQSALRTLGKLEEEHMVIVIVRDTA

SEQ ID NO: 4732 - protein, 211 aa, Homo sapiens [sequence omitted]

SEQ ID NO: 4733 - protein, 225 aa, Homo sapiens
  VARIANT 1: note = misc_feature - Xaa can be any naturally occurring amino acid
XPLADEYDPMFPNDYEKVVKRQREERQRQRELERQKEIEEREKRRKDRHEASGFARRPDPDSDEDEDYERERRKRSMGGAAIAPPTSLVEKDKELPRDFPYEEDSRPRSQSSKAAIPPPVYEEQDRPRSPTGPSNSFLANMGGTVAHKIMQKYGFREGQGLGKHEQGLSTALSVEKTSKRGGKIIVGDATEKGVSPGKRVTRGKGLAPSISDMASLDPHVSAGGQ

SEQ ID NO: 4734 - protein, 243 aa, Homo sapiens
MGRVGRAGRSQRTKQSTVLAPVIDLKRGGSSDDRQIVDTPPHVAAGLKDPVPSGFSAGEVLIPLADEYDPMFPNDYEKVVKRQREERQRQRELERQKEIEEREKRRKDRHEASGFARRPDPDSDEDEDYERERRKRSMGGAAIAPPTSLVEKDKELPRDFPYEEDSRPRSQSSKAAIPPPVYEEQDRPRSPTGPSNSFLANMGGTVAHKIMQKYGFREGQGLGKHEQGLSTALSVEKTSKRGG

SEQ ID NO: 4735 - protein, 243 aa, Homo sapiens; identical to SEQ ID NO: 4734

SEQ ID NO: 4736 - protein, 212 aa, Homo sapiens
MSLYDDLGVETSDSKTEGWSKNFKLLQSQLQVKKAALTQAKSQRTKQSTVLAPVIDLKRGGSSDDRQIVDTPPHVAAGLKDPVPSGFSAGEVLIPLADEYDPMFPNDYEKVVKRQREERQRQRELERQKEIEEREKRRKDRHEASGFARRPDPDSDEDEDYERERRKRSMGGAAIAPPTSLVEKDKELPRDFPYEEDSRPRSQSSKAAIPPP

SEQ ID NO: 4737 - protein, 221 aa, Homo sapiens
MSLYDDLGVETSDSKTEGWSKNFKLLQSQLQVKKAALTQAKSQRTKQSTVLAPVIDLKRGGSSDDRQIVDTPPHVAAGLKDPVPSGFSAGEVLIPLADEYDPMFPNDYEKVVKRQREERQRQRELERQKEIEEREKRKDRHEASGFARRPDPDSDEDEDYERERRKRSMGGAAIAPPTSLVEKDKELPRDFPYEEDSRPRSQSSKAAIPPPVYEEQDRPRS

SEQ ID NO: 4738 - protein, 401 aa, Homo sapiens
MSLYDDLGVETSDSKTEGWSKNFKLLQSQLQVKKAALTQAKSQRTKQSTVLAPVIDLKRGGSSDDRQIVDTPPHVAAGLKDPVPSGFSAGEVLIPLADEYDPMFPNDYEKVVKRQREERQRQRELERQKEIEEREKRRKDRHEASGFARRPDPDSDEDEDYERERRKRSMGGAAIAPPTSLVEKDKELPRDFPYEEDSRPRSQSSKAAIPPPVYEEQDRPRSPTGPSNSFLANMGGTVAHKIMQKYGFREGQGLGKHEQGLSTALSVEKTSKRGGKIIVGDATEKDASKKSDSNPLTEILKCPTKVVLLRNMVGAGEVDEDLEVETKEECEKYGKVGKCVIFEIPGAPDDEAVRIFLEFERVESAIKAVVDLNGRYFGGRVVKACFYNLDKFRVLDLAEQV

SEQ ID NO: 4739 - protein, 401 aa, Homo sapiens; identical to SEQ ID NO: 4738

SEQ ID NO: 4740 - protein, 190 aa, Homo sapiens
MEAETKTLPLENASILSEGSLQEGHRLWIGNLDPKITEYHLLKLLQKFGKVKQFDFLFHKSGALEGQPRGYCFVNFETKQEAEQAIQCLNGKLALSKKLVVRWAHAQVKRYDHNKNDKILPISLEPSSSTEPTQSNLSVTAKIKAIEAKLKMMAENPDAEYPAAPVYSYFKPPDKKRTTPYSRTAWKSRR

SEQ ID NO: 4741 - protein, 960 aa, Homo sapiens
MSRLIVKNLPNGMKEERFRQLFAAFGTLTDCSLKFTKDGKFRKFGFIGFKSEEEAQKAQKHFNKSFIDTSRITVEFCKSFGDPAKPRAWSKHAQKPSQPKQPPKDSTTPEIKKDEKKKKVAGQLEKLKEDTEFQEFLSVHQRRAQAATWANDGLDAEPSKGKSKPASDYLNFDSDSGQESEEEGAGEDLEEEASLEPKAAVQKELSDMDYLKSKMVKAGSSSSSEEEESEDEAVHCDEGSEAEEEDSSATPVLQERDSKGAGQEQGMPAGKKRPPEARAETEKPANQKEPTTCHTVKLRGAPFNVTEKNVMEFLAPLKPVAIRIVRNAHGNKTGYIFVDFSNEEEVKQALKCNREYMGGRYIEVFREKNVPTTKGAPKNTTKSWQGRILGENEEEEDLAESGRLFVRNLPYTSTEEDLEKLFSKYGPLSELHYPIDSLTKKPKGFAFITFMFPEHAVKAYSEVDGQVFQGRMLHVLPSTIKKEASEDASALGSSSYKKKKEAQDKANSASSHNWNTLFMGPNAVADAIAQKYNATKSQVFDHETKGSVAVRVALGETQLVQEVRRFLIDNGVSLDSFSQAAAERSKTVILVKNLPAGTLAAQLQETFGHFGSLGRVLLPEGGITAIVEFLEPLEARKAFRHLAYSKFHHVPLYLEWAPVGVFSSTAPQKKKLQDTPSEPMEKDPAEPETVPDGETPEDENPTEEGADNSSAKMEEEEEEEEEEEESLPGCTLFIKNLNFDTTEEKLKEVFSKVGTVKSCSISKKKNKAGVLLSMGFGFVEYRKPEQAQKALKQLQGHVVDGHKLEVRISERATKPAVTLARKKQVPRKQTTSKILVRNIPFQAHSREIRELFSTFGELKTVRLPKKMTGTGTHRGFGFVDFLTKQDAKRAFNALCHSTHLYGRRLVLEWADSEVTLQALRRKTAAHFHEPPKKKRSVVLDEILEQLEGSDSDSEEQTLQL

SEQ ID NO: 4742 - protein, 960 aa, Homo sapiens; identical to SEQ ID NO: 4741

SEQ ID NO: 4743 - protein, 960 aa, Homo sapiens; identical to SEQ ID NO: 4741

SEQ ID NO: 4744 - protein, 1125 aa, Homo sapiens
MVLAAAMSQDADPSGPEQPDRVACSVPGARASPAPSGPRGMQQPPPPPQPPPPPQAGLPQIIQNAAKLLDKNPFSVSNPNPLLPSPASLQLAQLQAQLTLHRLKLAQTAVTNNTAAATVLNQVLSKVAMSQPLFNQLRHPSVITGPHGHAGVPQHAAAIPSTRFPSNAIAFSPPSQTRGPGPSMNLPNQPPSAMVMHPFTGVMPQTPGQPAVILGIGKTGPAPATAGFYEYGKASSGQTYGPETDGQPGFLPSSASTSGSVTYEGHYSHTGQDGQAAFSKDFYGPNSQGSHVASGFPAEQAGGLKSEVGPLLQGTNSQWESPHGFSGQSKPDLTAGPMWPPPHNQPYELYDPEEPTSDRTPPSFGGRLNNSKQGFIGAGRRAKEDQALLSVRPLQAHELNDFHGVAPLHLPHICSICDKKVFDLKDWELHVKGKLHAQKCLVFSENAGIRCILGSAEGTLCASPNSTAVYNPAGNEDYASNLGTSYVPIPARSFTQSSPTFPLASVGTTFAQRKGAGRVVHICNLPEGSCTENDVINLGLPFGKVTNYILMKSTNQAFLEMAYTEAAQAMVQYYQEKSAVINGEKLLIRMSKRYKELQLKKPGKAVAAIIQDIHSQRERDMFREADRYGPERPRSRSPVSRSLSPRSHTPSFTSCSSSHSPPGPSRADWGNGRDSWEHSPYARREEERDPAPWRDNGDDKRDRMDPWAHDRKHHPRQLDKAELDERPEGGRPHREKYPRSGSPNLPHSVSSYKSREDGYYRKEPKAKWDKYLKQQQDAPGRSRRKDEARLRESRHPHPDDSGKEDGLGPKVTRAPEGAKAKQNEKNKTKRTDRDQEGADDRKENTMAENEAGKEEQEGMEESPQSVGRQEKEAEFSDPENTRTKKEQDWESESEAEGESWYPTNMEELVTVDEVGEEEDFIVEPDIPELEEIVPIDQKDKICPETCLCVTTTLDLDLAQDFPKEGVKAVGNGAAEISLKSPRELPSASTSCPSDMDVEMPGLNLDAERKPAESETGLSLEDSDCYEKEAKGVESSDVHPAPTVQQMSSPKPAEERARQPSPFVDDCKTRGTPEDGACEGSPLEEKASPPIETDLQNQACQGSDSDTRLVSGYSLTPLEKTPGTWK

SEQ ID NO: 4745 - protein, 1227 aa, Homo sapiens
MVLAAAMSQDADPSGPEQPDRVACSVPGARASPAPSGPRGMQQPPPPPQPPPPPQAGLPQIIQNAAKLLDKNPFSVSNPNPLLPSPASLQLAQLQAQLTLHRLKLAQTAVTNNTAAATVLNQVLSKVAMSQPLFNQLRHPSVITGPHGHAGVPQHAAAIPSTRFPSNAIAFSPPSQTRGPGPSMNLPNQPPSAMVMHPFTGVMPQTPGQPAVILGIGKTGPAPATAGFYEYGKASSGQTYGPETDGQPGFLPSSASTSGSVTYEGHYSHTGQDGQAAFSKDFYGPNSQGSHVASGFPAEQAGGLKSEVGPLLQGTNSQWESPHGFSGQSKPDLTAGPMWPPPHNQPYELYDPEEPTSDRTPPSFGGRLNNSKQGFIGAGRRAKEDQALLSVRPLQAHELNDFHGVAPLHLPHICSICDKKVFDLKDWELHVKGKLHAQKCLVFSENAGIRCILGSAEGTLCASPNSTAVYNPAGNEDYASNLGTSYVPIPARSFTQSSPTFPLASVGTTFAQRKGAGRVVHICNLPEGSCTENDVINLGLPFGKVTNYILMKSTNQAFLEMAYTEAAQAMVQYYQEKSAVINGEKLLIRMSKRYKELQLKKPGKAVAAIIQDIHSQRERDMFREADRYGPERPRSRSPVSRSLSPRSHTPSFTSCSSSHSPPGPSRADWGNGRDSWEHSPYARREEERDPAPWRDNGDDKRDRMDPWAHDRKHHPRQLDKAELDERPEGGRPHREKYPRSGSPNLPHSVSSYKSREDGYYRKEPKAKWDKYLKQQQDAPGRSRRKDEARLRESRHPHPDDSGKEDGLGPKVTRAPEGAKAKQNEKNKTKRTDRDQEGADDRKENTMAENEAGKEEQEGMEESPQSVGRQEKEAEFSDPENTRTKKEQDWESESEAEGESWYPTNMEELVTVDEVGEEEDFIVEPDIPELEEIVPIDQKDKICPETCLCVTTTLDLDLAQDFPKEGVKAVGNGAAEISLKSPRELPSASTSCPSDMDVEMPGLNLDAERKPAESETGLSLEDSDCYEKEAKGVESSDVHPAPTVQQMSSPKPAEERARQPSPFVDDCKTRGTPEDGACEGSPLEEKASPPIETDLQNQACQEVLTPENSRYVEMKSLEVRSPEYTEVELKQPLSLPSWEPEDVFSELSIPLGVEFVVPRTGFYCKLCGLFYTSEETAKMSHCRSAVHYRNLQKYLSQLAEEGLKETEGADSPRPEDSGIVPRFERKKL

SEQ ID NO: 4746 - protein, 371 aa, Homo sapiens
MATSLGSNTYNRQNWEDADFPILCQTCLGENPYIRMTKEKYGLPIQVRDAGLSFKDDMPKSDVNKEYYTQNMEREISNSDGTRPVGMLGKATSTSDMLLKLARTTPYYKRNRPHICSFWVKGECKRGEECPYRHEKPTDPDDPLADQNIKDRYYGINDPVADKLLKRASTMPRLDPPEDKTITTLYVGGLGDTITETDLRNHFYQFGEIRTITVVQRQQCAFIQFATRQAAEVAAEKSFNKLIVNGRRLNVKWGRSQAARGKEKEKDGTTDSGIKLEPVPGLPGALPPPPAAEEEASANYFNLPPSGPPAVVNIALPPPPGIAPPPPPGFGPHMFHPMGPPPPFMRAPGPIHYPSQDPQRMGAHAGKHSSP

SEQ ID NO: 4747 - protein, 420 aa, Homo sapiens
MATSLGSNTYNRQNWEDADFPILCQTCLGENPYIRMTKEKYGKECKICARPFTVFRWCPGVRMRFKKTEVCQTCSKLKNVCQTCLLDLEYGLPIQVRDAGLSFKDDMPKSDVNKEYYTQNMEREISNSDGTRPVGMLGKATSTSDMLLKLARTTPYYKRNRPHICSFWVKGECKRGEECPYRHEKPTDPDDPLADQNIKDRYYGINDPVADKLLKRASTMPRLDPPEDKTITTLYVGGLGDTITETDLRNHFYQFGEIRTITVVQRQQCAFIQFATRQAAEVAAEKSFNKLIVNGRRLNVKWGRSQAARGKEKEKDGTTDSGIKLEPVPGLPGALPPPPAAEEEASANYFNLPPSGPPAVVNIALPPPPGIAPPPPPGFGPHMFHPMGPPPPFMRAPGPIHYPSQDPQRMGAHAGKHSSP

SEQ ID NO: 4748 - protein, 371 aa, Homo sapiens
MATSLGSNTYNRQNWEDADFPILCQTCLGENPYIRMEREKSGLPIQVRDAGLSFKDDMPKSDVNKEYYTQNMEREISNSDGTRPVGMLGKATSTSDMLLKLARTTPYYKRNRPHICSFWVKGECKRGEECPYRHEKPTDPDDPLADQNIKDRYYGINDPVADKLLKRASTMPRLDPPEDKTITTLYVGGLGDTITETDLRNHFYQFGEIRTITVVQRQQCAFIQFATRQAAEVAAEKSFNKLIVNGRRLNVKWGRSQAARGKEKEKDGTTDSGIKLEPVPGLPGALPPPPAAEEEASANYFNLPPSGPPAVVNIALPPPPGIAPPPPPGFGPHMFHPMGPPPPFMRAPGPIHYPSQDPQRMGAHAGKHSSP

SEQ ID NO: 4749 - protein, 423 aa, Homo sapiens
MASDDFDIVIEAMLEAPYKKEEDEQQRKEVKKDYPSNTTSSTSNSGNETSGSSTIGETSNRSRDRDRYRRRNSRSRSPGRQCRHRSRSWDRRHGSESRSRDHRREDRVHYRSPPLATGYRYGHSKSPHFREKSPVREPVDNLSPEERDARTVFCMQLAARIRPRDLEDFFSAVGKVRDVRIISDRNSRRSKGIAYVEFCEIQSVPLAIGLTGQRLLGVPIIVQASQAEKNRLAAMANNLQKGNGGPMRLYVGSLHFNITEDMLRGIFEPFGKIDNIVLMKDSDTGRSKGYGFITFSDSECARRALEQLNGFELAGRPMRVGHVTERLDGGTDITFPDGDQELDLGSAGGRFQLMAKLAEGAGIQLPSTAAAAAAAAAQAAALQLNGAVPLGALNPAALTALSPALNLASQCFQLSSLFTPQTM

SEQ ID NO: 4750 - protein, 439 aa, Homo sapiens
MASDDFDIVIEAMLEAPYKKEEDEQQRKEVKKDYPSNTTSSTSNSGNETSGSSTIGETSKKKRSRSHNKSRDRKRSRSRDRDRYRRRNSRSRSPGRQCRHRSRSWDRRHGSESRSRDHRREDRVHYRSPPLATGYRYGHSKSPHFREKSPVREPVDNLSPEERDARTVFCMQLAARIRPRDLEDFFSAVGKVRDVRIISDRNSRRSKGIAYVEFCEIQSVPLAIGLTGQRLLGVPIIVQASQAEKNRLAAMANNLQKGNGGPMRLYVGSLHFNITEDMLRGIFEPFGKIDNIVLMKDSDTGRSKGYGFITFSDSECARRALEQLNGFELAGRPMRVGHVTERLDGGTDITFPDGDQELDLGSAGGRFQLMAKLAEGAGIQLPSTAAAAAAAAAQAAALQLNGAVPLGALNPAALTALSPALNLASQCFQLSSLFTPQTM

SEQ ID NO: 4751 - protein, 405 aa, Homo sapiens
MASDDFDIVIEAMLEAPYKKEEDEQQRKEVKKDYPSNTTSSTSNSGNETSGSSTIGETSNRSRDRDRYRRRNSRSRSPGRQCRHRSRSWDRRHGSESRSRDHRREDRVHYRSPPLATGEPVDNLSPEERDARTVFCMQLAARIRPRDLEDFFSAVGKVRDVRIISDRNSRRSKGIAYVEFCEIQSVPLAIGLTGQRLLGVPIIVQASQAEKNRLAAMANNLQKGNGGPMRLYVGSLHFNITEDMLRGIFEPFGKIDNIVLMKDSDTGRSKGYGFITFSDSECARRALEQLNGFELAGRPMRVGHVTERLDGGTDITFPDGDQELDLGSAGGRFQLMAKLAEGAGIQLPSTAAAAAAAAAQAAALQLNGAVPLGALNPAALTALSPALNLASQCFQLSSLFTPQTM

SEQ ID NO: 4752 - protein, 75 aa, Homo sapiens
MASDDFDIVIEAMLEAPYKKEEDEQQRKEVKKDYPSNTTSSTSNSGNETSGSSTIGETSKKKRSRSHNKSRDRKR

SEQ ID NO: 4753 - protein, 60 aa, Homo sapiens
MASDDFDIVIEAMLEAPYKKEEDEQQRKEVKKDYPSNTTSSTSNSGNETSGSSTIGETSK

SEQ ID NO: 4754 - protein, 91 aa, Homo sapiens
MASDDFDIVIEAMLEAPYKKEEDEQQRKEVKKDYPSNTTSSTSNSGNETSGSSTIGETSNRSRDRDRYRRRNSRSRSPGRQCRHRSRSWDR

SEQ ID NO: 4755 - protein, 101 aa, Homo sapiens
MASDDFDIVIEAMLEAPYKKEEDEQQRKEVKKDYPSNTTSSTSNSGNETSGSSTIGETSNRSRDRDRYRRRNSRSRSPGRQCRHRSRSWDRRHGSESRSRD

SEQ ID NO: 4756 - protein, 416 aa, Homo sapiens
MSNKGKKLKRIILAIPPAAPATVAMRPVEAAPSGRQARRRGVGAIIKAGIESAVVVEIGIGIDGEIVGAEVQVGSVVRSRSWDRRHGSESRSRDHRREDRVHYRSPPLATGYRYGHSKSPHFREKSPVREPVDNLSPEERDARTVFCMQLAARIRPRDLEDFFSAVGKVRDVRIISDRNSRRSKGIAYVEFCEIQSVPLAIGLTGQRLLGVPIIVQASQAEKNRLAAMANNLQKGNGGPMRLYVGSLHFNITEDMLRGIFEPFGKIDNIVLMKDSDTGRSKGYGFITFSDSECARRALEQLNGFELAGRPMRVGHVTERLDGGTDITFPDGDQELDLGSAGGRFQLMAKLAEGAGIQLPSTAAAAAAAAAQAAALQLNGAVPLGALNPAALTALSPALNLASQCFQLSSLFTPQTM

SEQ ID NO: 4757 - protein, 144 aa, Homo sapiens
MASDDFDIVIEAMLEAPYKKEEDEQQRKEVKKDYPSNTTSSTSNSGNETSGSSTIGETSKKKRSRSHNKSRDRKRSRSRDRDRYRRRNSRSRSPGRQCRHRSRSWDRRHGSESRSRDHRREDRVHYRSPPLATGEPVDNLSPEE

SEQ ID NO: 4758 - protein, 66 aa, Homo sapiens
MASDDFDIVIEAMLEAPYKKEEDEQQRKEVKKDYPSNTTSSTSNSGNETSGSSTIGETSNRSRDRD

SEQ ID NO: 4759 - protein, 57 aa, Homo sapiens
MASDDFDIVIEAMLEAPYKKEEDEQQRKEVKKDYPSNTTSSTSNSGNETSGSSTIGE

SEQ ID NO: 4760 - protein, 92 aa, Homo sapiens
MASDDFDIVIEAMLEAPYKKEEDEQQRKEVKKDYPSNTTSSTSNSGNETSGSSTIGETSKKKRSRSHNKSRDRKRSRSRDRDRYRRRNSRSR

SEQ ID NO: 4761 - protein, 100 aa, Homo sapiens
MASDDFDIVIEAMLEAPYKKEEDEQQRKEVKKDYPSNTTSSTSNSGNETSGSSTIGETSNRSRDRDRYRRRNSRSRSPGRQCRHRSRSWDRRHGSESRSR

SEQ ID NO: 4762 - protein, 236 aa, Homo sapiens
MHTTQKDTTYTKIFVGGLPYHTTDASLRKYFEVFGEIEEAVVITDRQTGKSRGYGFVTMADRAAAERACKDPNPIIDGRKANVNLAYLGAKPRIMQPGFAFGVQQLHPALIQRPFGIPAHYVYPQAFVQPGVVIPHVQPTAAAASTTPYIDYTGAAYAQYSAAAAAAAAAAAYDQYPYAASPAAAGYVTAGGYGYAVQQPITAAAPGTAAAAAAAAAAAAAFGQYQPQQLQTDRMQ

SEQ ID NO: 4763 - protein, 191 aa, Homo sapiens
MYVCLCVSVAKVTMADRAAAERACKDPNPIIDGRKANVNLAYLGAKPRIMQPGFAFGVQQLHPALIQRPFGIPAHYVYPQAFVQPGVVIPHVQPTAAAASTTPYIDYTGAAYAQYSAAAAAAAAAAAYDQYPYAASPAAAGYVTAGGYGYAVQQPITAAAPGTAAAAAAAAAAAAAFGQYQPQQLQTDRMQ

SEQ ID NO: 4764 - protein, 178 aa, Homo sapiens
MADRAAAERACKDPNPIIDGRKANVNLAYLGAKPRIMQPGFAFGVQQLHPALIQRPFGIPAHYVYPQAFVQPGVVIPHVQPTAAAASTTPYIDYTGAAYAQYSAAAAAAAAAAAYDQYPYAASPAAAGYVTAGGYGYAVQQPITAAAPGTAAAAAAAAAAAAAFGQYQPQQLQTDRMQ

SEQ ID NO: 4765 - protein, 127 aa, Homo sapiens
MSFPPHLNRPPMGIPALPPGIPPPQFPGFPPPVPPGTPMIPVPMSIMAPAPTVLVPTVSMVGKHLGARKDHPGLKAKENDENCGPTTTVFVGNISEKASDMLIRQLLAKCGLVLSWKRVQGASGKLQ

SEQ ID NO: 4766 - protein, 300 aa, Homo sapiens
MSFPPHLNRPPMGIPALPPGIPPPQFPGFPPPVPPGTPMIPVPMSIMAPAPTVLVPTVSMVGKHLGARKDHPGLKAKENDENCGPTTTVFVGNISEKASDMLIRQLLAKCGLVLSWKRVQGASGKLQAFGFCEYKEPESTLRALRLLHDLQIGEKKLLVKVDAKTKAQLDEWKAKKKASNGNARPETVTNDDEEALDEETKRRDQMIKGAIEVLIREYSSELNAPSQESDSHPRKKKKEKKEDIFRRFPVAPLIPYPLITKEDINAIEMEEDKRDLISREISKFRDTHKVVFLSFHLIPI

SEQ ID NO: 4767 - protein, 243 aa, Homo sapiens
MSFPPHLNRPPMGIPALPPGIPPPQFPGFPPPVPPGTPMIPVPMSIMAPAPTVLVPTVSMVGKHLGARKDHPGLKAKENDENCGPTTTVFVGNISEKASDMLIRQLLAKCGLVLSWKRVQGASGKLQAFGFCEYKEPESTLRALRLLHDLQIGEKKLLVKVDAKTKAQLDEWKAKKKASNGNARPETVTNDDEEALDEETKRRDQMIKGAIEVLIREYSSELNAPSQESDSHPRKKKKEKKED

SEQ ID NO: 4768 - protein, 843 aa, Homo sapiens
MSFPPHLNRPPMGIPALPPGIPPPQFPGFPPPVPPGTPMIPVPMSIMAPAPTVLVPTVSMVGKHLGARKDHPGLKAKENDENCGPTTTVFVGNISEKASDMLIRQLLAKCGLVLSWKRVQGASGKLQAFGFCEYKEPESTLRALRLLHDLQIGEKKLLVKVDAKTKAQLDEWKAKKKASNGNARPETVTNDDEEALDEETKRRDQMIKGAIEVLIREYSSELNAPSQESDSHPRKKKKEKKEDIFRRFPVAPLIPYPLITKEDINAIEMEEDKRDLISREISKFRDTHKKLEEEKGKKEKERQEIEKERRERERERERERERREREREREREREREKEKERERERERDRDRDRTKERDRDRDRERDRDRDRERSSDRNKDRSRSREKSRDREREREREREREREREREREREREREREREREREREKDKKRDREEDEEDAYERRKLERKLREKEAAYQERLKNWEIRERKKTREYEKEAEREEERRREMAKEAKRLKEFLEDYDDDRDDPKYYRGSALQKRLRDREKEMEADERDRKREKEELEEIRQRLLAEGHPDPDAELQRMEQEAERRRQPQIKQEPESEEEEEEKQEKEEKREEPMEEEEEPEQKPCLKPTLRPISSAPSVSSASGNATPNTPGDESPCGIIIPHENSPDQQQPEEHRPKIGLSLKLGASNSPGQPNSVKRKKLPVDSVFNKFEDEDSDDVPRKRKLVPLDYGEDDKNATKGTVNTEEKRKHIKSLIEKIPTAKPELFAYPLDWSIVDSILMERRIRPWINKKIIEYIGEEEATLVDFVCSKVMAHSSPQSILDDVAMVLDEEAEVFIVKMWRLLIYETEAKKIGLVK

SEQ ID NO: 4769 - protein, 843 aa, Homo sapiens; identical to SEQ ID NO: 4768

SEQ ID NO: 4770 - protein, 294 aa, Homo sapiens
MSFPPHLNRPPMGIPALPPGIPPPQFPGFPPPVPPGTPMIPVPMSIMAPAPTVLVPTVSMVGKHLGARKDHPGLKAKENDENCGPTTTVFVGNISEKASDMLIRQLLAKCGLVLSWKRVQGASGKLQAFGFCEYKEPESTLRALRLLHDLQIGEKKLLVKVDAKTKAQLDEWKAKKKASNGNARPETVTNDDEEALDEETKRRDQMIKGAIEVLIREYSSELNAPSQESDSHPRKKKKEKKEDIFRRFPVAPLIPYPLITKEDINAIEMEEDKRDLISREISKFRDTHKRSYGD

SEQ ID NO: 4771 - protein, 294 aa, Homo sapiens; identical to SEQ ID NO: 4770

SEQ ID NO: 4772 - protein, 980 aa, Homo sapiens
MVSKMIIENFEALKSWLSKTLEPICDADPSALAKYVLALVKKDKSEKELKALCIDQLDVFLQKETQIFVEKLFDAVNTKSYLPPPEQPSSGSLKVEFFPHQEKDIKKEEITKEEEREKKFSRRLNHSPPQSSSRYRENRSRDERKKDDRSRKRDYDRNPPRRDSYRDRYNRRRGRSRSYSRSRSRSWSKERLRERDRDRSRTRSRSRTRSRERDLVKPKYDLDRTDPLENNYTPVSSVPSISSGHYPVPTLSSTITVIAPTHHGNNTTESWSEFHEDQVDHNSYVRPPMPKKRCRDYDEKGFCMRGDMCPFDHGSDPVVVEDVNLPGMLPFPAQPPVVEGPPPPGLPPPPPILTPPPVNLRPPVPPPGPLPPSLPPVTGPPPPLPPLQPSGMDAPPNSATSSVPTVVTTGIHHQPPPAPPSLFTADTYDTDGYNPEAPSITNTSRPMYRHRVHAQRPNLIGLTSGDMDLPPREKPPNKSSMRIVVDSESRKRTIGSGEPGVPTKKTWFDKPNFNRTNSPGFQKKVQFGNENTKLELRKVPPELNNISKLNEHFSRFGTLVNLQVAYNGDPEGALIQFATYEEAKKAISSTEAVLNNRFIKVYWHREGSTQQLQTTSPKPLVQQPILPVVKQSVKERLGPVPSSTIEPAEAQSASSDLPQVLSTSTGLTKTVYNPAALKAAQKTLLVSTSAVDNNEAQKKKQEALKLQQDVRKRKQEILEKHIETQKMLISKLEKNKTMKSEDKAEIMKTLEVLTKNITKLKDEVKAASPGRCLPKSIKTKTQMQKELLDTELDLYKKMQAGEEVTELRRKYTELQLEAAKRGILSSGRGRGIHSRGRGAVHGRGRGRGRGRGVPGHAVVDHRPRALEISAFTESDREDLLPHFAQYGEIEDCQIDDSSLHAVITFKTRAEAEAAAVHGARFKGQDLKLAWNKPVTNISAVETEEVEPDEEEFQEESLVDDSLLQDDDEEEEDNESRSWRR

SEQ ID NO: 4773 - protein, 1007 aa, Homo sapiens
MVSKMIIENFEALKSWLSKTLEPICDADPSALAKYVLALVKKDKSEKELKALCIDQLDVFLQKETQIFVEKLFDAVNTKSYLPPPEQPSSGSLKVEFFPHQEKDIKKEEITKEEEREKKFSRRLNHSPPQSSSRYRENRSRDERKKDDRSRKRDYDRNPPRRDSYRDRYNRRRGRSRSYSRSRSRSWSKERLRERDRDRSRTRSRSRTRSRERDLVKPKYDLDRTDPLENNYTPVSSVPSISSGHYPVPTLSSTITVIAPTHHGNNTTESWSEFHEDQVDHNSYVRPPMPKKRCRDYDEKGFCMRGDMCPFDHGSDPVVVEDVNLPGMLPFPAQPPVVEGPPPPGLPPPPPILTPPPVNLRPPVPPPGPLPPSLPPVTGPPPPLPPLQPSGMDAPPNSATSSVPTVVTTGIHHQPPPAPPSLFTADTYDTDGYNPEAPSITNTSRPMYRHRVHAQRPNLIGLTSGDMDLPPREKPPNKSSMRIVVDSESRKRTIGSGEPGVPTKKTWFDKPNFNRTNSPGFQKKVQFGNENTKLELRKVPPELNNISKLNEHFSRFGTLVNLQVAYNGDPEGALIQFATYEEAKKAISSTEAVLNNRFIKVYWHREGSTQQLQTTSPKVMQPLVQQPILPVVKQSVKERLGPVPSSTIEPAEAQSASSDLPQNVTKLSVKDRLGFVSKPSVSATEKVLSTSTGLTKTVYNPAALKAAQKTLLVSTSAVDNNEAQKKKQEALKLQQDVRKRKQEILEKHIETQKMLISKLEKNKTMKSEDKAEIMKTLEVLTKNITKLKDEVKAASPGRCLPKSIKTKTQMQKELLDTELDLYKKMQAGEEVTELRRKYTELQLEAAKRGILSSGRGRGIHSRGRGAVHGRGRGRGRGRGVPGHAVVDHRPRALEISAFTESDREDLLPHFAQYGEIEDCQIDDSSLHAVITFKTRAEAEAAAVHGARFKGQDLKLAWNKPVTNISAVETEEVEPDEEEFQEESLVDDSLLQDDDEEEEDNESRSWRR

SEQ ID NO: 4774 - protein, 983 aa, Homo sapiens
MVSKMIIENFEALKSWLSKTLEPICDADPSALAKYVLALVKKDKSEKELKALCIDQLDVFLQKETQIFVEKLFDAVNTKSYLPPPEQPSSGSLKVEFFPHQEKDIKKEEITKEEEREKKFSRRLNHSPPQSSSRYRENRSRDERKKDDRSRKRDYDRNPPRRDSYRDRYNRRRGRSRSYSRSRSRSWSKERLRERDRDRSRTRSRSRTRSRERDLVKPKYDLDRTDPLENNYTPVSSVPSISSGHYPVPTLSSTITVIAPTHHGNNTTESWSEFHEDQVDHNSYVRPPMPKKRCRDYDEKGFCMRGDMCPFDHGSDPVVVEDVNLPGMLPFPAQPPVVEGPPPPGLPPPPPILTPPPVNLRPPVPPPGPLPPSLPPVTGPPPPLPPLQPSGMDAPPNSATSSVPTVVTTGIHHQPPPAPPSLFTADTYDTDGYNPEAPSITNTSRPMYRHRVHAQRPNLIGLTSGDMDLPPREKPPNKSSMRIVVDSESRKRTIGSGEPGVPTKKTWFDKPNFNRTNSPGFQKKVQFGNENTKLELRKVPPELNNISKLNEHFSRFGTLVNLQVAYNGDPEGALIQFATYEEAKKAISSTEAVLNNRFIKVYWHREGSTQQLQTTSPKVMQPLVQQPILPVVKQSVKERLGPVPSSTIEPAEAQSASSDLPQVLSTSTGLTKTVYNPAALKAAQKTLLVSTSAVDNNEAQKKKQEALKLQQDVRKRKQEILEKHIETQKMLISKLEKNKTMKSEDKAEIMKTLEVLTKNITKLKDEVKAASPGRCLPKSIKTKTQMQKELLDTELDLYKKMQAGEEVTELRRKYTELQLEAAKRGILSSGRGRGIHSRGRGAVHGRGRGRGRGRGVPGHAVVDHRPRALEISAFTESDREDLLPHFAQYGEIEDCQIDDSSLHAVITFKTRAEAEAAAVHGARFKGQDLKLAWNKPVTNISAVETEEVEPDEEEFQEESLVDDSLLQDDDEEEEDNESRSWRR

SEQ ID NO: 4775 - protein, 1060 aa, Homo sapiens
MLIEDVDALKSWLAKLLEPICDADPSALANYVVALVKKDKPEKELKAFCADQLDVFLQKETSGFVDKLFESLYTKNYLPLLEPVKPEPKPLVQEKEEIKEEVFQEPAEEERDGRKKKYPSPQKTRSESSERRTREKKREDGKWRDYDRYYERNELYREKYDWRRGRSKSRSKSRGLSRSRSRSRGRSKDRDPNRNVEHRERSKFKSERNDLESSYVPVSAPPPNSSEQYSSGAQSIPSTVTVIAPAHHSENTTESWSNYYNNHSSSNSFGRNLPPKRRCRDYDERGFCVLGDLCQFDHGNDPLVVDEVALPSMIPFPPPPPGLPPPPPPGMLMPPMPGPGPGPGPGPGPGPGPGPGPGHSMRLPVPQGHGQPPPSVVLPIPRPPITQSSLINSRDQPGTSAVPNLASVGTRLPPPLPQNLLYTVSERQPMYSREHGAAASERLQLGTPPPLLAARLVPPRNLMGSSIGYHTSVSSPTPLVPDTYEPDGYNPEAPSITSSGRSQYRQFFSRTQTQRPNLIGLTSGDMDVNPRAANIVIQTEPPVPVSINSNITRVVLEPDSRKRAMSGLEGPLTKKPWLGKQGNNNQNKPGFLRKNQYTNTKLEVKKIPQELNNITKLNEHFSKFGTIVNIQVAFKGDPEAALIQYLTNEEARKAISSTEAVLNNRFIRVLWHRENNEQPTLQSSAQLLLQQQQTLSHLSQQHHHLPQHLHQQQVLVAQSAPSTVHGGIQKMMSKPQTSGAYVLNKVPVKHRLGHAGGNQSDASHLLNQSGGAGEDCQIFSTPGHPKMIYSSSNLKTPSKLCSGSKSHDVQEVLKKKQEAMKLQQDMRKKRQEVLEKQIECQKMLISKLEKNKNMKPEERANIMKTLKELGEKISQLKDELKTSSAVSTPSKVKTKTEAQKELLDTELDLHKRLSSGEDTTELRKKLSQLQVEAARLGILPVGRGKTMSSQGRGRGRGRGGRGRGSLNHMVVDHRPKALTVGGFIEEEKEDLLQHFSTANQGPKFKDRRLQISWHKPKVPSISTETEEEEVKEEETETSDLFLPDDDDEDEDEYESRSWRR

SEQ ID NO: 4776 - protein, 759 aa, Homo sapiens
MAGLTLFVGRLPPSARSEQLEELFSQVGPVKQCFVVTEKGSKACRGFGYVTFSMLEDVQRALKEITTFEGCKINVTVAKKKLRNKTKEKGKNENSECPKKEPKAKKAKVADKKARLIIRNLSFKCSEDDLKTVFAQFGAVLEVNIPRKPDGKMRGFGFVQFKNLLEAGKALKGMNMKEIKGRTVAVDWAVAKDKYKDTQSVSAIGEEKSHESKHQESVKKKGREEEDMEEEENDDDDDDDDEEDGVFDDEDEEEENIESKVTKPVQIQKRAVKRPAPAKSSDHSEEDSDLEESDSIDDGEELAQSDTSTEEQEDKAVQVSNKKKRKLPSDVNEGKTVFIRNLSFDSEEEELGELLQQFGELKYVRIVLHPDTEHSKGCAFAQFMTQEAAQKCLLAASPENEAGGLKLDGRQLKVDLAVTRDEAAKLQTTKVKKPTGTRNLYLAREGLIRAGTKAAEGVSAADMAKRERFELLKHQKLKDQNIFVSRTRLCLHNLPKAVDDKQLRKLLLSATSGEKGVRIKECRVMRDLKGVHGNMKGQSLGYAFAEFQEHEHALKALRLINNNPEIFGPLKRPIVEFSLEDRRKLKMKELRIQRSLQKMRSKPATGEPQKGQPEPAKDQQQKAAQHHTEEQSKVPPEQKRKAGSTSWTGFQTKAEVEQVELPDGKKRRKVLALPSHRGPKIRLRDKGKVKPVHPKKPKPQINQWKQEKQQLSSEQVSRKKAKGNKTETRFNQLVEQYKQKLLGPSKGAPLAKRSKWFDS

SEQ ID NO: 4777 - protein, 28 aa, Homo sapiens
MHGRGRGVAGPMGRGRLMPNKQNLRVVE

SEQ ID NO: 4778 - protein, 268 aa, Homo sapiens
MAAALGASGGAGAGDDDFDQFDKPGAERSWRRRAADEDWDSELEDDLLGEDLLSGKKNQSDLSDEELNDDLLQSDNEDEENFSSQGVTISLNATSGMVTSFELSDNTNDQSGEQESEYEQEQGEDELVYHKSDGSELYTQEYPEEGQYEGHEAELTEDQIEYVEEPEEEQLYTDEVLDIEINEPLDEFTGGMETLELQKDIKEESDEEEEDDEESGRLRFKTERKEGTIIRLSDVTRERRNIPETLGNFFACLPSSFTLISTSSIVLL

SEQ ID NO: 4779 - protein, 1170 aa, Homo sapiens
MAAALGASGGAGAGDDDFDQFDKPGAERSWRRRAADEDWDSELEDDLLGEDLLSGKKNQSDLSDEELNDDLLQSDNEDEENFSSQGVTISLNATSGMVTSFELSDNTNDQSGEQESEYEQEQGEDELVYHKSDGSELYTQEYPEEGQYEGHEAELTEDQIEYVEEPEEEQLYTDEVLDIEINEPLDEFTGGMETLELQKDIKEESDEEEEDDEESGRLRFKTERKEGTIIRLSDVTRERRNIPETLELSAEAKAALLEFEERERQHKQGRYSSRRGGRRGGPLMCRGVGDQRRESTERGRMKDHRPALLPTQPPVVPQAPPPPPPPPQQQPIRSLFQPQPLQPLLPVQHPHHPSPPQGMHMPPQLETPRMMMTPPPVTPQQPKNIHINPHFKGTVVTPVQVPLLPVPSQPRPAVGPQRFPGPPEFPQHTPGPVPNSFSQPPRLPLQDQWRAPPPPQDRDPFFLGVSGEPRFPSHLFLEQRSPPPPPPPPTLLNSSHPVPTQSPLPFTQPGPAFNQQGQQPVFPRERPVRPALQPPGPVGILHFSQPGSATTRPFIPPRQPFLPGPGQPFLPTHTQPNLQGPLHPPLPPPHQPQPQQPQQQPPPQHQPPHQPPHQPPPQHQPPPQHPPQHPPQHQHHHHHHHLSVPPPPLMPMSQPQFRPHVQTAQPQASSSRMQCPQRQGLRHNTTSQNVSKRPMQQMQPTAPRNSNLRELPIAPSHVIEMSSSRCSATPSAQVKPIVSASPPSRAVAGSRSSQGKTEVKVKPASPVAQPKEEAKTETEFPDEDEETRLYRLKIEEQKRLREEILKQKELRRQQQAGARKKELLERLAQQQQQLYAPPPPAEQEEQALSPSPTNGNPLLPFPGAQVRQNVKNRLLVKNQDVSISNVQPKTSNFVPSSANMQYQGQQMKALKHLRQTRTVPQSQTQPLHKVLPIKPADVEEPAVPQTPRVASIQGRPQDTKPGVKRTVTHRTNSGGGDGPHISSKVRVIKLSGGGGESDGFFHPEGQPQRLPQPPEVGPQPARKVTLTRGGLQQPPHLPAGPHAHSPVPPGIKSIQGIHPAKKAIMHGRGRGVAGPMGRGRLMPNKQNLRVVECKPQPCVVSVEGLSSSTTDAQLKSLLMSVGPIQSLQMLPQQRKAIAKFKEPAHALAFQQKFHRHMIDLSHINVALIVE

SEQ ID NO: 4780 - protein, 106 aa, Homo sapiens
MHGRGRGVAGPMGRGRLMPNKQNLRVVECKPQPCVVSVEGLSSSTTDAQLKSLLMSVGPIQSLQMLPQQRKAIAKFKEPAHALAFQQKFHRHMIDLSHINVALIVE

SEQ ID NO: 4781 - protein, 430 aa, Homo sapiens
MALEGMSKRKRKRSVQEGENPDDGVRGSPPEDYRLGQVASSLFRGEHHSRGGTGRLASLFSSLEPQIQPVYVPVPKQTIKKTKRNEEEESTSQIERPLSQEPAKKVKAKKKHTNAEKKLADRESALASADLEEEIHQKQGQKRKNSQPGVKVADRKILDDTEDTVVSQRKKIQINQEEERLKNERTVFVGNLPVTCNKKKLKSFFKEYGQIESVRFRSLIPAEGTLSKKLAAIKRKIHPDQKNINAYVVFKEESAATQALKRNGAQIADGFRIRVDLASETSSRDKRSVFVGNLPYKVEESAIEKHFLDCGSIMAVRIVRDKMTGIGKGFGYVLFENTDSVHLALKLNNSELMGRKLRVMRSVNKEKFKQQNSNPRLKNVSKPKQGLNFTSKTAEGHPKSLFIGEKAVLLKTKKKGQKKSGRPKKQRKQK

SEQ ID NO: 4782 - protein, 211 aa, Homo sapiens
MALEGMSKRKRKRSVQEGENPDDGVRGSPPEDYRLGQVASSLFRGEHHSRGGTGRLASLFSSLEPQIQPVYVPVPKQTIKKTKRNEEEESTSQIERPLSQEPAKKVKAKKKHTNAEKKLADSSPFRLMLRPCLSISSNTLYCIYRFTIYFWESALASADLEEEIHQKQGQKRKNSQPGVKVADRKILDDTEDTVVSQRKKIQINQEEERLK

SEQ ID NO: 4783 - protein, 211 aa, Homo sapiens; identical to SEQ ID NO: 4782

SEQ ID NO: 4784 - protein, 425 aa, Homo sapiens
MSKRKRKRSVQEGENPDDGVRGSPPEDYRLGQVASSLFRGEHHSRGGTGRLASLFSSLEPQIQPVYVPVPKQTIKKTKRNEEEESTSQIERPLSQEPAKKVKAKKKHTNAEKKLADRESALASADLEEEIHQKQGQKRKNSQPGVKVADRKILDDTEDTVVSQRKKIQINQEEERLKNERTVFVGNLPVTCNKKKLKSFFKEYGQIESVRFRSLIPAEGTLSKKLAAIKRKIHPDQKNINAYVVFKEESAATQALKRNGAQIADGFRIRVDLASETSSRDKRSVFVGNLPYKVEESAIEKHFLDCGSIMAVRIVRDKMTGIGKGFGYVLFENTDSVHLALKLNNSELMGRKLRVMRSVNKEKFKQQNSNPRLKNVSKPKQGLNFTSKTAEGHPKSLFIGEKAVLLKTKKKGQKKSGRPKKQRKQK

SEQ ID NO: 4785 - protein, 239 aa, Homo sapiens
MLLQPAPCAPSAGFPRPLAAPGAMHGSQKDTTFTKIFVGGLPYHTTDASLRKYFEGFGDIEEAVVITDRQTGKSRGYGFVTMADRAAAERACKDPNPIIDGRKANVNLAYLGAKPRSLQTGFAIGVQQLHPTLIQRTYGLTPHYIYPPAIVQPSVVIPAAPVPSLSSPYIEYTPASPAYAQYPPATYDQYPYAASPATAASFVGYSYPAAVPQALSAAAPAGTTFVQYQAPQLQPDRMQ

SEQ ID NO: 4786 - protein, 121 aa, Homo sapiens
MLLQPAPCAPSAGFPRPLAAPGAMHGSQKDTTFTKIFVGGLPYHTTDASLRKYFEGFGDIEEAVVITDRQTGKSRGYGFVTMADRAAAERACKDPNPIIDGRKANVNLAYLGAKPRSLQTG

SEQ ID NO: 4787 - protein, 158 aa, Homo sapiens
MADRAAAERACKDPNPIIDGRKANVNLAYLGAKPRSLQTGFAIGVQQLHPTLIQRTYGLTPHYIYPPAIVQPSVVIPAAPVPSLSSPYIEYTPASPAYAQYPPATYDQYPYAASPATAASFVGYSYPAAVPQALSAAAPAGTTFVQYQAPQLQPDRMQ

SEQ ID NO: 4788 - protein, 530 aa, Homo sapiens
MADDIDIEAMLEAPYKKDENKLSSANGHEERSKKRKKSKSRSRSHERKRSKSKERKRSRDRERKKSKSRERKRSRSKERRRSRSRSRDRRFRGRYRSPYSGPKFNSAIRGKIGLPHSIKLSRRRSRSKSPFRKDKSPVREPIDNLTPEERDARTVFCMQLAARIRPRDLEEFFSTVGKVRDVRMISDRNSRRSKGIAYVEFVDVSSVPLAIGLTGQRVLGVPIIVQASQAEKNRAAAMANNLQKGSAGPMRLYVGSLHFNITEDMLRGIFEPFGRIESIQLMMDSETGRSKGYGFITFSDSECAKKALEQLNGFELAGRPMKVGHVTERTDASSASSFLDSDELERTGIDLGTTGRLQLMARLAEGTGLQIPPAAQQALQMSGSLAFGAVAEFSFVIDLQTRLSQQTEASALAAAASVQPLATQCFQLSNMFNPQTEEEVGWDTEIKDDVIEECNKHGGVIHIYVDKNSAQGNVYVKCPSIAAAIAAVNALHGRWFAGKMITAAYVPLPTYHNLFPDSMTATQLLVPSRR

SEQ ID NO: 4789 - protein, 373 aa, Homo sapiens
MQLAARIRPRDLEEFFSTVGKVRDVRMISDRNSRRSKGIAYVEFVDVSSVPLAIGLTGQRVLGVPIIVQASQAEKNRAAAMANNLQKGSAGPMRLYVGSLHFNITEDMLRGIFEPFGRIESIQLMMDSETGRSKGYGFITFSDSECAKKALEQLNGFELAGRPMKVGHVTERTDASSASSFLDSDELERTGIDLGTTGRLQLMARLAEGTGLQIPPAAQQALQMSGSLAFGAVAEFSFVIDLQTRLSQQTEASALAAAASVQPLATQCFQLSNMFNPQTEEEVGWDTEIKDDVIEECNKHGGVIHIYVDKNSAQGNVYVKCPSIAAAIAAVNALHGRWFAGKMITAAYVPLPTYHNLFPDSMTATQLLVPSRR

SEQ ID NO: 4790 - protein, 524 aa, Homo sapiens
MADDIDIEAMLEAPYKKDENKLSSANGHEERSKKRKKSKSRSRSHERKRSKSKERKRSRDRERKKSKSRERKRSRSKERRRSRSRSRDRRFRGRYRSPYSGPKFNSAIRGKIGLPHSIKLSRRRSRSKSPFRKDKSPVREPIDNLTPEERDARTVFCMQLAARIRPRDLEEFFSTVGKVRDVRMISDRNSRRSKGIAYVEFVDVSSVPLAIGLTGQRVLGVPIIVQASQAEKNRAAAMANNLQKGSAGPMRLYVGSLHFNITEDMLRGIFEPFGRIESIQLMMDSETGRSKGYGFITFSDSECAKKALEQLNGFELAGRPMKVGHVTERTDASSASSFLDSDELERTGIDLGTTGRLQLMARLAEGTGLQIPPAAQQALQMSGSLAFGAVADLQTRLSQQTEASALAAAASVQPLATQCFQLSNMFNPQTEEEVGWDTEIKDDVIEECNKHGGVIHIYVDKNSAQGNVYVKCPSIAAAIAAVNALHGRWFAGKMITAAYVPLPTYHNLFPDSMTATQLLVPSRR

SEQ ID NO: 4791 - protein, 337 aa, Homo sapiens
  VARIANT 1: note = misc_feature - Xaa can be any naturally occurring amino acid
XSPFRKDKSPVREPIDNLTPEERDARTVFCMQLAARIRPRDLEEFFSTVGKVRDVRMISDRNSRRSKGIAYVEFVDVSSVPLAIGLTGQRVLGVPIIVQASQAEKNRAAAMANNLQKGSAGPMRLYVGSLHFNITEDMLRGIFEPFGRFSDSECAKKALEQLNGFELAGRPMKVGHVTERTDASSASSFLDSDELERTGIDLGTTGRLQLMARLAEGTGLQIPPAAQQALQMSGSLAFGAVAEFSFVIDLQTRLSQQTEASALAAAASVQPLATQCFQLSNMFNPQTEEEVGWDTEIKDDVIEECNKHGGVIHIYVDKNSAQGNVYVKCPSIAAAIA

SEQ ID NO: 4792 - protein, 231 aa, Homo sapiens
MADDIDIEAMLEAPYKKDENKLSSANGHEERSKKRKKSKSRSRSHERKRSKSKERKRSRDRERKKSKSRERKRSRSKERRRSRSRSRDRRFRGRYRSPYSGPKFNSAIRGKIGLPHSIKLRRRSRSKSPFRKDKSPVREPIDNLTPEERDARTVFCMQLAARIRPRDLEEFFSTVGKVRDVRMISDRNSRRSKGIAYVEFVDVSSVPLAIGLTGQRVLGVPIIVQASQAEK

SEQ ID NO: 4793 - protein, 508 aa, Homo sapiens
MADDIDIEAMLEAPYKKDENKLSSANGHEERSKKRKKSKSRSRSHERKRSKSKERKRSRDRERKKSKSRERKRSRSKERRRSRSRSRDRRFRGRYRSPYRRRSRSKSPFRKDKSPVREPIDNLTPEERDARTVFCMQLAARIRPRDLEEFFSTVGKVRDVRMISDRNSRRSKGIAYVEFVDVSSVPLAIGLTGQRVLGVPIIVQASQAEKNRAAAMANNLQKGSAGPMRLYVGSLHFNITEDMLRGIFEPFGRIESIQLMMDSETGRSKGYGFITFSDSECAKKALEQLNGFELAGRPMKVGHVTERTDASSASSFLDSDELERTGIDLGTTGRLQLMARLAEGTGLQIPPAAQQALQMSGSLAFGAVAEFSFVIDLQTRLSQQTEASALAAAASVQPLATQCFQLSNMFNPQTEEEVGWDTEIKDDVIEECNKHGGVIHIYVDKNSAQGNVYVKCPSIAAAIAAVNALHGRWFAGKMITAAYVPLPTYHNLFPDSMTATQLLVPSRR

SEQ ID NO: 4794 - protein, 423 aa, Homo sapiens
MADDIDIEAMLEAPYKKDENKLSSANGHEERSKKRKKSKSRSRSHERKRSKSKERKRSRDRERKKSKSRERKRSRSKERRRSRSRSRDRRFRGRYRSPYSGPKFNSAIRGKIGLPHSIKLSRRRSRSKSPFRKDKSPVREPIDNLTPEERDARTVFCMQLAARIRPRDLEEFFSTVGKVRDVRMISDRNSRRSKGIAYVEFVDVSSVPLAIGLTGQRVLGVPIIVQASQAEKNRAAAMANNLQKGSAGPMRLYVGSLHFNITEDMLRGIFEPFGRIESIQLMMDSETGRSKGYGFITFSDSECAKKALEQLNGFELAGRPMKVGHVTERTDASSASSFLDSDELERTGIDLGTTGRLQLMARLAEGTGLQIPPAAQQALQMSGSLAFGAVADLQTRLSQQTEALFVIMFWNEIWSDNMITLQL

SEQ ID NO: 4795 - protein, 193 aa, Homo sapiens
MADDIDIEAMLEAPYKKDENKLSSANGHEERSKKRKKSKSRSRSHERKRSKSKERKRSRDRERKKSKSRERKRSRSKERRRSRSRSRDRRFRGRYRSPYSGPKFNSAIRGKIGLPHSIKLSRRRSRSKSPFRKDKSPVREPIDNLTPEERDARTVFCMQLAARIRPRDLEEFFSTVGKVRDVRMISDRNSRRS

SEQ ID NO: 4796 - protein, 177 aa, Homo sapiens
MVKLFIGNLPREATEQEIRSLFEQYGKVLECDIIKNYGFVHIEDKTAAEDAIRNLHHYKLHGVNINVEASKNKSKTSTKLHVGNISPTCTNKELRAKFEEYGPVIECDIVKDYAFVHMERAEDAVEAIRGLDNTEFQGEPPSLGRGLNTRLCAENGWISKRRGLVKITAVGWLVMKK

SEQ ID NO: 4797 - protein, 364 aa, Homo sapiens
MVKLFIGNLPREATEQEIRSLFEQYGKVLECDIIKNYGFVHIEDKTAAEDAIRNLHHYKLHGVNINVEASKNKSKTSTKLHVGNISPTCTNKELRAKFEEYGPVIECDIVKDYAFVHMERAEDAVEAIRGLDNTEFQGKRMHVQLSTSRLRTAPGMGDQSGCYRCGKEGHWSKECPIDRSGRVADLTEQYNEQYGAVRTPYTMSYGDSLYYNNAYGALDAYYKRCRAARSYEAVAAAAASVYNYAEQTLSQLPQVQNTAMASHLTSTSLDPYDRHLLPTSGAAATAAAAAAAAAAVTAASTSYYGRDRSPLRRATAPVPTVGEGYGYGHESELSQASAAARNSLYDMARYEREQYADRARYSAF

SEQ ID NO: 4798 - protein, 364 aa, Homo sapiens; identical to SEQ ID NO: 4797

SEQ ID NO: 4799 - protein, 177 aa, Homo sapiens; identical to SEQ ID NO: 4796

SEQ ID NO: 4800 - protein, 364 aa, Homo sapiens; identical to SEQ ID NO: 4797

SEQ ID NO: 4801 - protein, 203 aa, Homo sapiens
  VARIANT 1: note = misc_feature - Xaa can be any naturally occurring amino acid
XVNSCVKSDEHVLEELETEGERQLKSLLQHQLDTSVSIEECMSKKESFAPGTMYKPFGKEAAGTMTLSQFQTLHEKDQETASLRELGLNETEILIWKSHVSGEKKTKLRATPEAIQNRLQDIEERISERQRILCLPQRFAKSKQLTRREMEIEKSLFQGADRHSFLKALYYQAYHKKTSADKYMTSMKRKIKLGTKGIIPEEP

SEQ ID NO: 4802 - protein, 413 aa, Homo sapiens
MKRVNSCVKSDEHVLEELETEGERQLKSLLQHQLDTSVSIEECMSKKESFAPGTMYKPFGKEAAGTMTLSQFQTLHEKDQETASLRELGLNETEILIWKSHVSGEKKTKLRATPEAIQNRLQDIEERISERQRILCLPQRFAKSKQLTRREMEIEKSLFQGADRHSFLKALYYQDEPQKKNKGDPMNNLESFYQEMIMKKRLEEFQLMRGEPFASHSLVSATSVGDSGTAESPSLLQDKGKQAAQGKGPSLHVANVIDFSPEQCWTGPKKLTQPIEFVPEDEIQRNRLSEEEIRKIPMFSSYNPGEPNKVLYLKNLSPRVTERDLVSLFARFQEKKGPPIQFRMMTGRMRGQAFITFPNKEIAWQALHLVNGYKLHGKILVIEFGKNKKQRSNLQATSLISCATGSTTEISGS

SEQ ID NO: 4803 - protein, 405 aa, Homo sapiens
MKRVNSCVKSDEHVLEELETEGERQLKSLLQHQLDTSVSIEECMSKKESFAPGTMYKPFGKEAAGTMTLSQFQTLHEKDQETASLRELGLNETEILIWKSHVSGEKKTKLRATPEAIQNRLQDIEERISERQRILCLPQRFAKSKQLTRREMEIEKSLFQGADRHSFLKALYYQDEPQKKNKGDPMNNLESFYQEMIMKKRLEEFQLMRGEPFASHSLVSATSVGDSGTAESPSLLQDKGKQAAQGKGPSLHVANVIDFSPEQCWTGPKKLTQPIEFVPEDEIQRNRLSEEEIRKIPMFSSYNPGEPNKVLYLKNLSPRVTERDLVSLFARFQEKKGPPIQFRMMTGRMRGQAFITFPNKEIAWQALHLVNGYKLHGKILVIEFGKNKKQRSNLQATSLISCATG

SEQ ID NO: 4804 - protein, 205 aa, Homo sapiens
MKRVNSCVKSDEHVLEELETEGERQLKSLLQHQLDTSVSIEECMSKKESFAPGTMYKPFGKEAAGTMTLSQFQTLHEKDQETASLRELGLNETEILIWKSHVSGEKKTKLRATPEAIQNRLQDIEERISERQRILCLPQRFAKSKQLTRREMEIEKSLFQGADRHSFLKALYYQAYHKKTSADKYMTSMKRKIKLGTKGIIPNPP

SEQ ID NO: 4805 - protein, 311 aa, Homo sapiens
MKRVNSCVKSDEHVLEELETEGERQLKSLLQHQLDTSVSIEECMSKKESFAPGTMYKPFGKEAAGTMTLSQFQTLHEKDQETASLRELGLNETEILIWKSHVSGEKKTKLRATPEAIQNRLQDIEERISERQRILCLPQRFAKSKQLTRREMEIEKSLFQGADRHSFLKALYYQAYHKKTSADKYMTSMKRKIKLGTKDEPQKKNKGDPMNNLESFYQEMIMKKRLEEFQLMRGLTSFPREDFQNLSYEGTTSVLGAKWQKRTGRTSTFSILLVSLLSETVFTSSAMYGIPHLLTMSLKFSTRIGKLSFTP

SEQ ID NO: 4806 - protein, 480 aa, Homo sapiens
MAGAGPAPGLPGAGGPVVPGPGAGIPGKSGEERLKEMEAEMALFEQEVLGAPVPGIPTAVPAVPTVPTVPTVEAMQVPAAPVIRPIIATNTYQQVQQTLEARAAAAATVVPPMVGGPPFVGPVGFGPGDRSHLDSPEAREAMFLRRAAVAPQRAPILRPAFVPHVLQRADSALSSAAAGPRPMALRPPHQALVGPPLPGPPGPPMMLPPMARAPGPPLGSMAALRPPLEEPAAPRELGLGLGLGLKEKEEAVVAAAAGLEEASAAVAVGAGGAPAGPAVIGPSLPLALAMPLPEPEPLPLPLEVVRGLLPPLRIPELLSLRPRPRPPRPEPPPGLMALEVPEPLGEDKKKGKPEKLKRCIRTAAGSSWEDPSLLEWDADDFRIFCGDLGNEVNDDILARAFSRFPSFLKAKVIRDKRTGKTKGYGFVSFKDPSDYVRAMREMNGKYVGSRPIKLRKSMWKDRNLDVVRKKQKEKKKLGLR

SEQ ID NO: 4807 - protein, 451 aa, Homo sapiens
MAGAGPAPGLPGAGGPVVPGPGAGIPGKSGEERLKEMEAEMALFEQEVLGAPVPGIPTAVPAVPTVPTVPTVEAMQVPAAPVIRPIIATNTYQQVQQTLEARAAAAATVVPPMVGGPPFVGPVGFGPGDRSHLDSPEAREAMFLRRAAAGPRPMALRPPHQALVGPPLPGPPGPPMMLPPMARAPGPPLGSMAALRPPLEEPAAPRELGLGLGLGLKEKEEAVVAAAAGLEEASAAVAVGAGGAPAGPAVIGPSLPLALAMPLPEPEPLPLPLEVVRGLLPPLRIPELLSLRPRPRPPRPEPPPGLMALEVPEPLGEDKKKGKPEKLKRCIRTAAGSSWEDPSLLEWDADDFRIFCGDLGNEVNDDILARAFSRFPSFLKAKVIRDKRTGKTKGYGFVSFKDPSDYVRAMREMNGKYVGSRPIKLRKSMWKDRNLDVVRKKQKEKKKLGLR

SEQ ID NO: 4808 - protein, 357 aa, Homo sapiens
MASVLNVKESKAPERTVVVAGLPVDLFSDQLLAVLVKSHFQDIKNEGGDVEDVIYPTRTKGVAYVIFKEKKVAENVIRQKKHWLARKTRHAELTVSLRVSHFGDKIFSSVNAILDLSVFGKEVTLETLVKDLKKKIPSLSFSPLKPNGRISVEGSFLAVKRLRESLLARACSLLEKDRNFTSEERKWNRQNPQRNLQRSNNSLASVRTLVPETARSGEMLVLDTDVFLYLKHKCGSYESTLKKFHILSQEKVDGEITTICLKSIQVGSQPNNAKHVKELIEEWSHALYLKLRKETFILEGKENREKRMIKRACEQLSSRYLEVLINLYRTHIDIIGSSSDTYLFKKGVMKLIGQKVS

SEQ ID NO: 4809 - protein, 1052 aa, Homo sapiens
MMQATAVVETASGKGYHSNGGNLQKDKPSNPKKENLLLSSNGCDEVKLTFPDDDWNSSTLEQRANNKEISNIDKMDLLEPFFSVSQDTNTESTQFQSSELEDSTDYAFLNKTYSIPYSESKLKKESLTPLSSELDPEVQKKEEVFFNILEHQDKTVGLERIYNISDANYRESAEDTQKHDTDEDSQQEYHSAEEQEYISNHLSFDQTKALDISNPEVVELGNSGYEVKCASNVEDNRVNSGSGSIISFDSLDVYGQEESLHVSKFQNSVMLREYHDLKHEKYKEQETNSMYHTVFDGSVLRSNSPGNQESQSKSGSLSPQKVLKMKIYTENMKSQINEGKDFCGNKIVENKILLHLENPSTLPQDKALETLLQPCKDCQTSWTSVFDDSIISACGYYESLQNTADSALDFSAMLPKIAVRDNQAIEDNTSLKVAHSSTTKKTCFHNIGEMCTKSLTDAASCTVTINQTVDVSTDFRACFTTSRATSARPSVVSTSSNTEITMMNKKRPDEWQNEKQKSVACSTDWSYSEDCIDTQMAITKGSGKSLSVDSLKPNGNFLNKDFLELRKACGITDLKKHPEREFQLFKDTEKDLPSMCCQKIMQRAIKAELHLLNVHYQMCRRHCCDIYKLVMENREGLNMNLSSNSAKKELGSALLSLLGDLKVRYVTLKEKIHKGIPLEELPPLSLESKLLSTFSTFASRLMKKETHVFSEADAEQDNQRAHDVDVSSNLKKTLSQMSLSSDNSHATQNISPKKDDFKNGDINADFSQLKLGDKDCRHYQETSEDWSDAKESLTGVDVSGTQGNQVEQDTWNLDLTGEMKNVEPSQRDKGYLIHVGGLCPSVSEADLRSHFQKYQVSEISIYDSTNYRYASLAFTKNSDAKIAVKEMNGIEINGKSVNVWPVKILGEYTSPLSSKNGNRISSNNLEKSTNKQIHSEFSISRLPRTRPRQLGSEQDSEVFPSDQGVKKNCKQIESAKLLPDTPVQFIPPNTLNLRSFTKIIKRLAELHPEVSRDHIINALQEVRIRHKGFLNGLSITTIVEMTSSLLKNSASS

SEQ ID NO: 4810 - protein, 1052 aa, Homo sapiens; identical to SEQ ID NO: 4809

SEQ ID NO: 4811 - protein, 474 aa, Homo sapiens
MDEAGSSASGGGFRPGVDSLDEPPNSRIFLVISKYTPESVLRERFSPFGDIQDIWVVRDKHTKESKGIAFVKFARSSQACRAMEEMHGQCLGPNDTKPIKVFIAQSRSSGSHRDVEDEELTRIFVMIPKSYTEEDLREKFKVYGDIEYCSIIKNKVTGESKGLGYVRYLKPSQAAQAIENCDRSFRAILAEPKNKASESSEQDYYSNMRQEALGHEPRVNMFPFEQQSEFSSFDKNDSRGQEAISKRLSVVSRVPFTEEQLFSIFDIVPGLEYCEVQRDPYSNYGHGVVQYFNVASAIYAKYKLHGFQYPPGNRIGVSFIDDGSNATDLLRKMATQMVAAQLASMVWNNPSQQQFMQFGGSSGSQLPQIQTDVVLPSCKKKAPAETPVKERLFIVFNPHPLPLDVLEDIFCRFGNLIEVYLVSGKNVGYAKYADRISANDAIATLHGKILNGVRLKVMLADSPREESNKRQRTY

SEQ ID NO: 4812 - protein, 135 aa, Homo sapiens
  VARIANT 1: note = misc_feature - Xaa can be any naturally occurring amino acid
XQLASMVWNNPSQQQFMQFGGSSGSQLPQIQTDVVLPSCKKKAPAETPVKERLFIVFNPHPLPLDVLEDIFCRFGNLIEVYLVSGKNVGYAKYADRISANDAIATLHGKILNGVRLKVMLADSPREESNKRQRTY

SEQ ID NO: 4813 - protein, 533 aa, Homo sapiens
MNEENIDGTNGCSKVRTGIQNEAALLALMEKTGYNMVQENGQRKFGGPPPGWEGPPPPRGCEVFVGKIPRDMYEDELVPVFERAGKIYEFRLMMEFSGENRGYAFVMYTTKEEAQLAIRILNNYEIRPGKFIGVCVSLDNCRLFIGAIPKEKKKEEILDEMKKVTEGVVDVIVYPSATDKTKNRGFAFVEYESHRAAAMARRKLIPGTFQLWGHTIQVDWADPEKEVDEETMQRVKVLYVRNLMISTTEETIKAEFNKFKPGAVERVKKLRDYAFVHFFNREDAVAAMSVMNGKCIDGASIEVTLAKPVNKENTWRQHLNGQISPNSENLIVFANKEESHPKTLGKLPTLPARLNGQHSPSPPEVERCTYPFYPGTKLTPISMYSLKSNHFNSAVMHLDYYCNKNNWAPPEYYLYSTTSQDGKVLLVYKIVIPAIANGSQSYFMPDKLCTTLEDAKELAAQFTLLHLDYNFHRSSINSLSPVSATLSSGTPSVLPYTSRPYSYPGYPLSPTISLANGSHVGQRLCISNQASFF

SEQ ID NO: 4814 - protein, 593 aa, Homo sapiens
MTAEDSTAAMSSDSAAGSSAKVPEGVAGAPNEAALLALMERTGYSMVQENGQRKYGGPPPGWEGPHPQRGCEVFVGKIPRDVYEDELVPVFEAVGRIYELRLMMDFDGKNRGYAFVMYCHKHEAKRAVRELNNYEIRPGRLLGVCCSVDNCRLFIGGIPKMKKREEILEEIAKVTEGVLDVIVYASAADKMKNRGFAFVEYESHRAAAMARRKLMPGRIQLWGHQIAVDWAEPEIDVDEDVMETVKILYVRNLMIETTEDTIKKSFGQFNPGCVERVKKIRDYAFVHFTSREDAVHAMNNLNGTELEGSCLEVTLAKPVDKEQYSRYQKAARGGGAAEAAQQPSYVYSCDPYTLAYYGYPYNALIGPNRDYFVKAGSIRGRGRGAAGNRAPGPRGSYLGGYSAGRGIYSRYHEGKGKQQEKGYELVPNLEIPTVNPVAIKPGTVAIPAIGAQYSMFPAAPAPKMIEDGKIHTVEHMISPIAVQPDPASAAAAAAAAAAAAAAVIPTVSTPPPFQGRPITPVYTVAPNVQRIPTAGIYGASYVPFAAPATATIATLQKNAAAAAAMYGGYAGYIPQAFPAAAIQVPIPDVYQTY

SEQ ID NO: 4815 - protein, 593 aa, Homo sapiens; identical to SEQ ID NO: 4814

SEQ ID NO: 4816 - protein, 59 aa, Homo sapiens
MTAEDSTAAMSSDSAAGSSAKVPEGVAGAPNEAALLALMERTGYSMVQENGQRKYGGPP

SEQ ID NO: 4817 - protein, 217 aa, Homo sapiens
MTAEDSTAAMSSDSAAGSSAKVPEGVAGAPNEAALLALMERTGYSMVQENGQRKYGGPPPGWEGPHPQRGCEVFVGKIPRDVYEDELVPVFEAVGRIYELRLMMDFDGKNRGYAFVMYCHKHEAKRAVRELNNYEIRPGRLLGVCCSVDNCRLFIGGIPKMKKREEILEEIAKVTEGVLDVIVYASAADKMKNRGFAFVEYESHRAAAMARRKLMPG

SEQ ID NO: 4818 - protein, 114 aa, Homo sapiens
MTAEDSTAAMSSDSAAGSSAKVPEGVAGAPNEAALLALMERTGYSMVQENGQRKYGGPPPGWEGPHPQRGCEVFVGKIPRDVYEDELVPVFEAVGRIYELRLMMDFDGKNRGYA

SEQ ID NO: 4819 - protein, 193 aa, Homo sapiens
MTAEDSTAAMSSDSAAGSSAKVPEGVAGAPNEAALLALMERTGYSMVQENGQRKYGGPPPGWEGPHPQRGCEVFVGKIPRDVYEDELVPVFEAVGRIYELRLMMDFDGKNRGYAFVMYCHKHEAKRAVRELNNYEIRPGRLLGVCCSVDNCRLFIGGIPKMKKREEILEEIAKVTEGVLDVIVYASAADKMKN

SEQ ID NO: 4820 - protein, 159 aa, Homo sapiens
MTAEDSTAAMSSDSAAGSSAKVPEGVAGAPNEAALLALMERTGYSMVQENGQRKYGGPPPGWEGPHPQRGCEVFVGKIPRDVYEDELVPVFEAVGRIYELRLMMDFDGKNRGYAFVMYCHKHEAKRAVRELNNYEIRPGRLLGVCCSVDNCRLFIGGIP

SEQ ID NO: 4821 - protein, 137 aa, Homo sapiens
MTAEDSTAAMSSDSAAGSSAKVPEGVAGAPNEAALLALMERTGYSMVQENGQRKYGGPPPGWEGPHPQRGCEVFVGKIPRDVYEDELVPVFEAVGRIYELRLMMDFDGKNRGYAFVMYCHKHEAKRAVRELNNYEIR

SEQ ID NO: 4822 - protein, 524 aa, Homo sapiens
MTAEDSTAAMSSDSAAGSSAKVPEGVAGAPNEAALLALMERTGYSMVQENGQRKYGGPPPGWEGPHPQRGCEVFVGKIPRDVYEDELVPVFEAVGRIYELRLMMDFDGKNRGYAFVMYCHKHEAKRAVRELNNYEIRPGRLLGVCCSVDNCRLFIGGIPKMKKREEILEEIAKVTEGVLDVIVYASAADKMKNRGFAFVEYESHRAAAMARRKLMPGRIQLWGHQIAVDWAEPEIDVDEDVMETVKILYVRNLMIETTEDTIKKSFGQFNPGCVERVKKIRDYAFVHFTSREDAVHAMNNLNGTELEGSCLEVTLAKPVDKEQYSRYQKAARGGGAAEAAQQPSYVYSCDPYTLAYYGYPYNALIGPNRDYFVKVAIPAIGAQYSMFPAAPAPKMIEDGKIHTVEHMISPIAVQPDPASAAAAAAAAAAAAAAVIPTVSTPPPFQGRPITPVYTVAPNVQRIPTAGIYGASYVPFAAPATATIATLQKNAAAAAAMYGGYAGYIPQAFPAAAIQVPIPDVYQTY

SEQ ID NO: 4823 - protein, 124 aa, Homo sapiens
MTAEDSTAAMSSDSAAGSSAKVPEGVAGAPNEAALLALMERTGYSMVQENGQRKYGGPPPGWEGPHPQRGCEVFVGKIPRDVYEDELVPVFEAVGRIYELRLMMDFDGKNRGYAFVMYCHKHEA

SEQ ID NO: 4824 - protein, 524 aa, Homo sapiens; identical to SEQ ID NO: 4822

SEQ ID NO: 4825 - protein, 59 aa, Homo sapiens; identical to SEQ ID NO: 4816

SEQ ID NO: 4826 - protein, 126 aa, Homo sapiens
GKMASSGGELGSLFDHHVQRAVCDTRAKYREGRRPRAVKVYTINLESQYLLIQGVPAVGVMKELVERFALYGAIEQYNALDEYPAEDFTEVYLIKFMNLQSARTAKRKMDEQSFFWIASCVLCSRI

SEQ ID NO: 4827 - protein, 360 aa, Homo sapiens [sequence omitted]

SEQ ID NO: 4828 - protein, 367 aa, Homo sapiens
MASSGGELGSLFDHHVQRAVCDTRAKYREGRRPRAVKVYTINLESQYLLIQGVPAVGVMKELVERFALYGAIEQYNALDEYPAEDFTEVYLIKFMNLQSARTAKRKMDEQSFFGGLLHVCYAPEFETVEETRKKLQMRKAYVVKTTENKDHYVTKKKLVTEHKDTEDFRQDFHSEMSGFCKAALNTSAGNSNPYLPYSCELPLCYFSSKCMCSSGGPVDRAPDSSKDGRNHHKTMGHYNHNDSLRKTQINSLKNSVACPGAQKAITSSEAVDRFMPRTTQLQERKRRREDDRKLGTFLQTNPTGNEIMIGPLLPDISKVDMHDDSLNTTANLIRHKLKEVISSVPKPPEDKPEDVHTSHPLKQRRRI

SEQ ID NO: 4829 - protein, 359 aa, Homo sapiens
MVKLFIGNLPREATEQEIRSLFEQYGKVLECDIIKNYGFVHIEDKTAAEDAIRNLHHYKLHGVNINVEASKNKSKASTKLHVGNISPTCTNQELRAKFEEYGPVIECDIVKDYAFVHMERAEDAVEAIRGLDNTEFQGKRMHVQLSTSRLRTAPGMGDQSGCYRCGKEGHWSKECPVDRTGRVADFTEQYNEQYGAVRTPYTMGYGESMYYNDAYGALDYYKRYRVRSYEAVAAAAAASAYNYAEQTMSHLPQVQSTTVTSHLNSTSVDPYDRHLLPNSGAAATSAAMAAAAATTSSYYGRDRSPLRRAAAMLPTVGEGYGYGPESELSQASAATRNSLYDMARYEREQYVDRARYSAF

SEQ ID NO: 4830 - protein, 359 aa, Homo sapiens; identical to SEQ ID NO: 4829

SEQ ID NO: 4831 - protein, 143 aa, Homo sapiens
MGSDKRVSRTERSGRYGSIIDRDDRDERESRSRRRDSDYKRSSDDRRGDRYDDYRDYDSPERERERRNSDRSEDGYHSDGDYGEHDYRHDISDERESKTIMLRGLPITITESDIREMMESFEGPQPADVRLMKRKTGESLLSS

SEQ ID NO: 4832 - protein, 815 aa, Homo sapiens
MGSDKRVSRTERSGRYGSIIDRDDRDERESRSRRRDSDYKRSSDDRRGDRYDDYRDYDSPERERERRNSDRSEDGYHSDGDYGEHDYRHDISDERESKTIMLRGLPITITESDIREMMESFEGPQPADVRLMKRKTGVSRGFAFVEFYHLQDATSWMEANQKKLVIQGKHIAMHYSNPRPKFEDWLCNKCCLNNFRKRLKCFRCGADKFDSEQEVPPGTTESVQSVDYYCDTIILRNIAPHTVVDSIMTALSPYASLAVNNIRLIKDKQTQQNRGFAFVQLSSAMDASQLLQILQSLHPPLKIDGKTIGVDFAKSARKDLVLSDGNRVSAFSVASTAIAAAQWSSTQSQSGEGGSVDYSYLQPGQDGYAQYAQYSQDYQQFYQQQAGGLESDASSASGTAVTTTSAAVVSQSPQLYNQTSNPPGSPTEEAQPSTSTSTQAPAASPTGVVPGTKYAVPDTSTYQYDESSGYYYDPTTGLYYDPNSQYYYNSLTQQYLYWDGEKETYVPAAESSSHQQSGLPPAKEGKEKKEKPKSKTAQQIAKDMERWAKSLNKQKENFKNSFQPVNSLREEERRESAAADAGFALFEKKGALAERQQLIPELVRNGDEENPLKRGLVAAYSGDSDNEEELVERLESEEEKLADWKKMACLLCRRQFPNKDALVRHQQLSDLHKQNMDIYRRSRLSEQELEALELREREMKYRDRAAERREKYGIPEPPEPKRKKQFDAGTVNYEQPTKDGIDHSNIGNKMLQAMGWREGSGLGRKCQGITAPIEAQVRLKGAGLGAKGSAYGLSGADSYKDAVRKAMFARFTEME

SEQ ID NO: 4833 - protein, 137 aa, Homo sapiens
MGSDKRVSRTERSGRYGSIIDRDDRDERESRSRRRDSDYKRSSDDRRGDRYDDYRDYDSPERERERRNSDRSEDGYHSDGDYGEHDYRHDISDERESKTIMLRGLPITITESDIREMMESFEGPQPADVRLMKRKTG

SEQ ID NO: 4834 - protein, 814 aa, Homo sapiens
GTKCRVSRTERSGRYGSIIDRDDRDERESRSRRRDSDYKRSSDDRRGDRYDDYRDYDSPERERERRNSDRSEDGYHSDGDYGEHDYRHDISDERESKTIMLRGLPITITESDIREMMESFEGPQPADVRLMKRKTGVSRGFAFVEFYHLQDATSWMEANQKKLVIQGKHIAMHYSNPRPKFEDWLCNKCCLNNFRKRLKCFRCGADKFDSEQEVPPGTTESVQSVDYYCDTIILRNIAPHTVVDSIMTALSPYASLAVNNIRLIKDKQTQQNRGFAFVQLSSAMDASQLLQILQSLHPPLKIDGKTIGVDFAKSARKDLVLSDGNRVSAFSVASTAIAAAQWSSTQSQSGEGGSVDYSYLQPGQDGYAQYAQYSQDYQQFYQQQAGGLESDASSASGTAVTTTSAAVVSQSPQLYNQTSNPPGSPTEEAQPSTSTSTQAPAASPTGVVPGTKYAVPDTSTYQYDESSGYYYDPTTGLYYDPNSQYYYNSLTQQYLYWDGEKETYVPAAESSSHQQSGLPPAKEGKEKKEKPKSKTAQQIAKDMERWAKSLNKQKENFKNSFQPVNSLREEERRESAAADAGFALFEKKGALAERQQLIPELVRNGDEENPLKRGLVAAYSGDSDNEEELVERLESEEEKLADWKKMACLLCRRQFPNKDALVRHQQLSDLHKQNMDIYRRSRLSEQELEALELREREMKYRDRAAERREKYGIPEPPEPKRKKQFDAGTVNYEQPTKDGIDHSNIGNKMLQAMGWREGSGLGRKCQGITAPIEAQVRLKGAGLGAKGSAYGLSGADSYKDAVRKAMFARFTEME

SEQ ID NO: 4835 - protein, 126 aa, Homo sapiens
MGSDKRVSRTERSGRYGSIIDRDDRDERESRSRRRDSDYKRSSDDRRGDRYDDYRDYDSPENDKYSRNDGVLRRPSACGCEADEEENRCKPWFRLRGVLSLARCYQLDGSQSEKVGDSRKAHCNAL

SEQ ID NO: 4836 - protein, 120 aa, Homo sapiens
MGSDKRVSRTERSGRYGSIIDRDDRDERESRSRRRDSDYKRSSDDRRGDRYDDYRDYDSPERERERRNSDRSEDGYHSDGDYGEHDYRHDISDERESKTIMLRGLPITITESDIREMMES

SEQ ID NO: 4837 - protein, 105 aa, Homo sapiens
MGSDKRVSRTERSGRYGSIIDRDDRDERESRSRRRDSDYKRSSDDRRGDRYDDYRDYDSPERERERRNSDRSEDGYHSDGDYGEHDYRHDISDERESKTIMLRGL

SEQ ID NO: 4838 - protein, 505 aa, Homo sapiens
NGFRSGERDLVLSDGNRVSAFSVASTAIAAAQWSSTQSQSGEGGSVDYSYLQPGQDGYAQYAQYSQDYQQFYQQQAGGLESDASSASGTAVTTTSAAVVSQSPQLYNQTSNPPGSPTEEAQPSTSTSTQAPAASPTGVVPGTKYAVPDTSTYQYDESSGYYYDPTTGLYYDPNSQYYYNSLTQQYLYWDGEKETYVPAAESSSHQQSGLPPAKEGKEKKEKPKSKTAQQIAKDMERWAKSLNKQKENFKNSFQPVNSLREEERRESAAADAGFALFEKKGALAERQQLIPELVRNGDEENPLKRGLVAAYSGDSDNEEELVERLESEEEKLADWKKMACLLCRRQFPNKDALVRHQQLSDLHKQNMDIYRRSRLSEQELEALELREREMKYRDRAAERREKYGIPEPPEPKRKKQFDAGTVNYEQPTKDGIDHSNIGNKMLQAMGWREGSGLGRKCQGITAPIEAQVRLKGAGLGAKGSAYGLSGADSYKDAVRKAMFARFTEME

SEQ ID NO: 4839 - protein, 149 aa, Homo sapiens
GTKCRVSRTERSGRYGSIIDRDDRDERESRSRRRDSDYKRSSDDRRGDRYDDYRDYDSPERERERRNSDRSEDGYHSDGDYGEHDYRHDISDERESKTIMLRGLPITITESDIREMMESFEGPQPADVRLMKRKTEKVGDSRKAHCNAL

SEQ ID NO: 4840 - protein, 601 aa, Homo sapiens
MIQDKEVTLEYVSSLDFWYCKRCKANIGGHRSSCSFCKNPREVTEAKQELITYPQPQKTSIPAPLEKQPNQPLRPADKEPEPRKREEGQESRLGHQKREAERYLPPSRREGPTFRRDRERESWSGETRQDGESKTIMLKRIYRSTPPEVIVEVLEPYVRLTTANVRIIKNRTGPMGHTYGFIDLDSHAEALRVVKILQNLDPPFSIDGKMVAVNLATGKRRNDSGDHSDHMHYYQGKKYFRDRRGGGRNSDWSSDTNRQGQQSSSDCYIYDSATGYYYDPLAGTYYDPNTQQEVYVPQDPGLPEEEEIKEKKPTSQGKSSSKKEMSKRDGKEKKDRGVTRFQENASEGKAPAEDVFKKPLPPTVKKEESPPPPKVVNPLIGLLGEYGGDSDYEEEEEEEQTPPPQPRTAQPQKREEQTKKENEEDKLTDWNKLACLLCRRQFPNKEVLIKHQQLSDLHKQNLEIHRKIKQSEQELAYLERREREGKFKGRGNDRREKLQSFDSPERKRIKYSRETDSDRKLVDKEDIDTSSKGGCVQQATGWRKGTGLGYGHPGLASSEEAEGRMRGPSVGASGRTSKRQSNETYRDAVRRVMFARYKELD

SEQ ID NO: 4841 - protein, 601 aa, Homo sapiens; identical to SEQ ID NO: 4840

SEQ ID NO: 4842 - protein, 520 aa, Homo sapiens
MWGDSRPANRTGPFRGSQEERFAPGWNRDYPPPPLKSHAQERHSGNFPGRDSLPFDFQGHSGPPFANVEEHSFSYGARDGPHGDYRGGEGPGHDFRGGDFSSSDFQSRDSSQLDFRGRDIHSGDFRDREGPPMDYRGGDGTSMDYRGREAPHMNYRDRDAHAVDFRGRDAPPSDFRGRGTYDLDFRGRDGSHADFRGRDLSDLDFRAREQSRSDFRNRDVSDLDFRDKDGTQVDFRGRGSGTTDLDFRDRDTPHSDFRGRHRSRTDQDFRGREMGSCMEFKDREMPPVDPNILDYIQPSTQDREHSGMNVNRREESTHDHTIERPAFGIQKGEFEHSETREGETQGVAFEHESPADFQNSQSPVQDQDKSQLSGREEQSSDAGLFKEEGGLDFLGRQDTDYRSMEYRDVDHRLPGSQMFGYGQSKSFPEGKTARDAQRDLQDQDYRTGPSEEKPSRLIRLSGVPEDATKEEILNAFRTPDGMPVKNLQLKEYNTGNSNDPGQRSYPGVCIKPGFLVLQTM

SEQ ID NO: 4843 - protein, 991 aa, Homo sapiens
MDYRGGDGTSMDYRGREAPHMNYRDRDAHAVDFRGRDAPPSDFRGRGTYDLDFRGRDGSHADFRGRDLSDLDFRAREQSRSDFRNRDVSDLDFRDKDGTQVDFRGRGSGTTDLDFRDRDTPHSDFRGRHRSRTDQDFRGREMGSCMEFKDREMPPVDPNILDYIQPSTQDREHSGMNVNRREESTHDHTIERPAFGIQKGEFEHSETREGETQGVAFEHESPADFQNSQSPVQDQDKSQLSGREEQSSDAGLFKEEGGLDFLGRQDTDYRSMEYRDVDHRLPGSQMFGYGQSKSFPEGKTARDAQRDLQDQDYRTGPSEEKPSRLIRLSGVPEDATKEEILNAFRTPDGMPVKNLQLKEYNTGYDYGYVCVEFSLLEDAIGCMEANQGTLMIQDKEVTLEYVSSLDFWYCKRCKANIGGHRSSCSFCKNPREVTEAKQELITYPQPQKTSIPAPLEKQPNQPLRPADKEPEPRKREEGQESRLGHQKREAERYLPPSRREGPTFRRDRERESWSGETRQDGESKTIMLKRIYRSTPPEVIVEVLEPYVRLTTANVRIIKNRTGPMGHTYGFIDLDSHAEALRVVKILQNLDPPFSIDGKMVAVNLATGKRRNDSGDHSDHMHYYQGKKYFRDRRGGGRNSDWSSDTNRQGQQSSSDCYIYDSATGYYYDPLAGTYYDPNTQQEVYVPQDPGLPEEEEIKEKKPTSQGKSSSKKEMSKRDGKEKKDRGVTRFQENASEGKAPAEDVFKKPLPPTVKKEESPPPPKVVNPLIGLLGEYGGDSDYEEEEEEEQTPPPQPRTAQPQKREEQTKKENEEDKLTDWNKLACLLCRRQFPNKEVLIKHQQLSDLHKQNLEIHRKIKQSEQELAYLERREREGKFKGRGNDRREKLQSFDSPERKRIKYSRETDSDRKLVDKEDIDTSSKGGCVQQATGWRKGTGLGYGHPGLASSEEAEGRMRGPSVGASGRTSKRQSNETYRDAVRRVMFARYKELD

SEQ ID NO: 4844 - protein, 142 aa, Homo sapiens
MWGDSRPANRTGPFRGSQEERFAPGWNRDYPPPPLKSHAQERHSGNFPGRDSLPFDFQGHSGPPFANVEEHSFSYGARDGPHGDYRGGEGPGHDFRGGDFSSSDFQSRDSSQLDFRGRDIHSGDFRDREGPPMDYRGGDGTS

SEQ ID NO: 4845 - protein, 76 aa, Homo sapiens
MWGDSRPANRTGPFRGSQEERFAPGWNRDYPPPPLKSHAQERHSGNFPGRDSLPFDFQGHSGPPFANVEEHSFSYG

SEQ ID NO: 4846 - protein, 465 aa, Homo sapiens
MLKRIYRSTPPEVIVEVLEPYVRLTTANVRIIKNRTGPMGHTYGFIDLDSHAEALRVVKILQNLDPPFSIDGKMVAVNLATGKRRNDSGDHSDHMHYYQGKKYFRDRRGGGRNSDWSSDTNRQGQQSSSDCYIYDSATGYYYDPLAGTYYDPNTQQEVYVPQDPGLPEEEEIKEKKPTSQGKSSSKKEMSKRDGKEKKDRGVTRFQENASEGKAPAEDVFKKPLPPTVKKEESPPPPKVVNPLIGLLGEYGGDSDYEEEEEEEQTPPPQPRTAQPQKREEQTKKENEEDKLTDWNKLACLLCRRQFPNKEVLIKHQQLSDLHKQNLEIHRKIKQSEQELAYLERREREGKFKGRGNDRREKLQSFDSPERKRIKYSRETDSDRKLVDKEDIDTSSKGGCVQQATGWRKGTGLGYGHPGLASSEEAEGRMRGPSVGASGRTSKRQSNETYRDAVRRVMFARYKELD

SEQ ID NO: 4847 - protein, 1123 aa, Homo sapiens
MWGDSRPANRTGPFRGSQEERFAPGWNRDYPPPPLKSHAQERHSGNFPGRDSLPFDFQGHSGPPFANVEEHSFSYGARDGPHGDYRGGEGPGHDFRGGDFSSSDFQSRDSSQLDFRGRDIHSGDFRDREGPPMDYRGGDGTSMDYRGREAPHMNYRDRDAHAVDFRGRDAPPSDFRGRGTYDLDFRGRDGSHADFRGRDLSDLDFRAREQSRSDFRNRDVSDLDFRDKDGTQVDFRGRGSGTTDLDFRDRDTPHSDFRGRHRSRTDQDFRGREMGSCMEFKDREMPPVDPNILDYIQPSTQDREHSGMNVNRREESTHDHTIERPAFGIQKGEFEHSETREGETQGVAFEHESPADFQNSQSPVQDQDKSQLSGREEQSSDAGLFKEEGGLDFLGRQDTDYRSMEYRDVDHRLPGSQMFGYGQSKSFPEGKTARDAQRDLQDQDYRTGPSEEKPSRLIRLSGVPEDATKEEILNAFRTPDGMPVKNLQLKEYNTGYDYGYVCVEFSLLEDAIGCMEANQGTLMIQDKEVTLEYVSSLDFWYCKRCKANIGGHRSSCSFCKNPREVTEAKQELITYPQPQKTSIPAPLEKQPNQPLRPADKEPEPRKREEGQESRLGHQKREAERYLPPSRREGPTFRRDRERESWSGETRQDGESKTIMLKRIYRSTPPEVIVEVLEPYVRLTTANVRIIKNRTGPMGHTYGFIDLDSHAEALRVVKILQNLDPPFSIDGKMVAVNLATGKRRNDSGDHSDHMHYYQGKKYFRDRRGGGRNSDWSSDTNRQGQQSSSDCYIYDSATGYYYDPLAGTYYDPNTQQEVYVPQDPGLPEEEEIKEKKPTSQGKSSSKKEMSKRDGKEKKDRGVTRFQENASEGKAPAEDVFKKPLPPTVKKEESPPPPKVVNPLIGLLGEYGGDSDYEEEEEEEQTPPPQPRTAQPQKREEQTKKENEEDKLTDWNKLACLLCRRQFPNKEVLIKHQQLSDLHKQNLEIHRKIKQSEQELAYLERREREGKFKGRGNDRREKLQSFDSPERKRIKYSRETDSDRKLVDKEDIDTSSKGGCVQQATGWRKGTGLGYGHPGLASSEEAEGRMRGPSVGASGRTSKRQSNETYRDAVRRVMFARYKELD

SEQ ID NO: 4848 - protein, 266 aa, Homo sapiens
MGAAAAEADRTLFVGNLETKVTEELLFELFHQAGPVIKVKIPKDKDGKPKQFAFVNFKHEVSVPYAMNLLNGIKLYGRPIKIQFRSGSSHAPQDVSLSYPQHHVGNSSPTSTSPSRYERTMDNMTSSAQIIQRSFSSPENFQRQAVMNSALRQMSYGGKFGSSPLDQSGFSPSVQSHSHSFNQSSSSQWRQGTPSSQRKVRMNSYPYLADRHYSREQRYTDHGSDHHYRGKRDDFFYEDRNHDDWSHDYDNRRDSSRDGKWRSSRH

SEQ ID NO: 4849 - protein, 173 aa, Homo sapiens
MADVLDLHEAGGEDFAMDEDGDESIHKLKEKAKKRKGRGFGSEGSRARMREDYDSVEQDGDEPGPQRSVEGWILFVTGVHEEATEEDIHDKFAEYGEIKNIHLNLDRRTGYLKGYTLVEYETYKEAQAAMEGLNGQDLMGQPISVDWCFVRGPPKGKRRGGRRRSRSPDRRRR

SEQ ID NO: 4850 - protein, 174 aa, Homo sapiens
MADVLDLHEAGGEDFAMDEDGDESIHKLKEKAKKRKGRGFGSEEGSRARMREDYDSVEQDGDEPGPQRSVEGWILFVTGVHEEATEEDIHDKFAEYGEIKNIHLNLDRRTGYLKGYTLVEYETYKEAQAAMEGLNGQDLMGQPISVDWCFVRGPPKGKRRGGRRRSRSPDRRRR

SEQ ID NO: 4851 - protein, 378 aa, Homo sapiens
MVEADRPGKLFIGGLNTETNEKALEAVFGKYGRIVEVLLMKDRESPADAKDAARDMNGKSLDGKAIKVEQATKPSFESGRRGPPPPPRSRGPPRGLRGGRGGSGGTRGPPSRGGHMDDGGYSMNFNMSSSRGPLPVKRGPPPRSGGPPPKRSAPSGPVRSSSGMGGRAPVSRGRDSYGGPPRREPLPSRRDVYLSPRDDGYSTKDSYSSRDYPSSRDTRDYAPPPRDYTYRDYGHSSSRDDYPSRGYSDRDGYGRDRDYSDHPSGGSYRDSYESYGNSRSAPPTRGPPPSYGGSSRYDDYSSSRDGYGGSRDSYSSSRSDLYSSGRDRVGRQERGLPPSMERGYPPPRDSYSSSSRGAPRGGGRGGSRSDRGGGRSRY

SEQ ID NO: 4852 - protein, 391 aa, Homo sapiens
MVEADRPGKLFIGGLNTETNEKALEAVFGKYGRIVEVLLMKDRETNKSRGFAFVTFESPADAKDAARDMNGKSLDGKAIKVEQATKPSFESGRRGPPPPPRSRGPPRGLRGGRGGSGGTRGPPSRGGHMDDGGYSMNFNMSSSRGPLPVKRGPPPRSGGPPPKRSAPSGPVRSSSGMGGRAPVSRGRDSYGGPPRREPLPSRRDVYLSPRDDGYSTKDSYSSRDYPSSRDTRDYAPPPRDYTYRDYGHSSSRDDYPSRGYSDRDGYGRDRDYSDHPSGGSYRDSYESYGNSRSAPPTRGPPPSYGGSSRYDDYSSSRDGYGGSRDSYSSSRSDLYSSGRDRVGRQERGLPPSMERGYPPPRDSYSSSSRGAPRGGGRGGSRSDRGGGRSRY

SEQ ID NO: 4853 - protein, 102 aa, Homo sapiens
  VARIANT 1: note = misc_feature - Xaa can be any naturally occurring amino acid
XMFICPQEMMGILLKTAIQAEITQVLVILEIMHHHHEIILTVIMVIPVHVMTIHQEDIAIEMDMVVIVTIQIIQVEVPTEIHMRVMVGDFAHYGRGVLIDSQ

SEQ ID NO: 4854 - protein, 196 aa, Homo sapiens
MVEADRPGKLFIGGLNTETNEKALEAVFGKYGRIVEVLLMKDRETNKSRGFAFVTFESPADAKDAARDMNGKLLYHVEEIVMEVHLEGNRCPLVEMFICPQEMMGILLKTAIQAEITQVLVILEIMHHHHEIILTVIMVIPVHVMTIHQEDIAIEMDMVVIVTIQIIQVEVPTEIHMRVMVGDFAHYGRGVLIDSQ

SEQ ID NO: 4855 - protein, 322 aa, Homo sapiens
MNPLTKVKLINELNEREVQLGVADKVSWHSEYKDSAWIFLGGLPYELTEGDIICVFSQYGEIVNINLVRDKKTGKSKGFCFLCYEDQRSTILAVDNFNGIKIKGRTIRVDHVSNYRAPKDSEEIDDVTRQLQEKGCGARTPSPSLSESSEDEKPTKKHKKDKKEKKKKKKEKEKADREVQAEQPSSSSPRRKTVKEKDDTGPKKHSSKNSERAQKSEPREGQKLPKSRTAYSGGAEDLERELKKEKPKHEHKSSSRREAREEKTRIRDRGRSSDAHSSWYNGRSEGRSYRSRSRSRDKSHRHKRARRSRERESSNPSDRWRH

SEQ ID NO: 4856 - protein, 58 aa, Homo sapiens
MNPLTKVKLINELNEREVQLGVADKVSWHSEYKDSAWIFLGGLPYELTEGDIICVFSQ

SEQ ID NO: 4857 - protein, 275 aa, Homo sapiens
MNPLTKVKLINELNEREVQLGVADKVSWHSEYKDSAWIFLGGLPYELTEGDIICVFSQYGEIVNINLVRDKKTGKSKGFCFLCYEDQRSTILAVDNFNGIKIKGRTIRVDHVSNYRAPKDSEEIDDVTRQLQEKGCGARTPSPSLSESSEDEKPTKKHKKDKKEKKKKKKEKEKADREVQAEQPSSSSPRRKTVKEKDDTGPKKHSSKNSERAQKSEPREGQKLPKSRTAYSGGAEDLERELKKEKPKHEHKSSSRREAREEKTRIRDRGLRCTF

SEQ ID NO: 4858 - protein, 390 aa, Homo sapiens
MVEADRPGKLFIGGLNTETNEKALETVFGKYGRIVEVLLIKDRETNKSRGFAFVTFESPADAKDAARDMNGKSLDGKAIKVEQATKPSFERGRHGPPPPPRSRGPPRGFGAGRGGSGGTRGPPSRGGHMDDGGYSMNFNMSSSRGPLPVKRGPPPRSGGPSPKRSAPSGLVRSSSGMGGRAPLSRGRDSYGGPPRREPLPSRRDVYLSPRDDGYSTKDSYSSRDYPSSRDTRDYAPPPRDYTYRDYGHSSSRDDYPSRGYGDRDGYGRDRDYSDHPSGGSYRDSYESYGNSRSAPLTRGPPPSYGGSSRYDDYSSSRDGYGGSRDSYSSSRSDLYSSCDRVGRQERGLPPSVERGYPSSRDSYSSSSRGAPRGAGPGGSRSDRGGGRSRY

SEQ ID NO: 4859 - protein, 390 aa, Homo sapiens; identical to SEQ ID NO: 4858

SEQ ID NO: 4860 - protein, 392 aa, Homo sapiens
MVEADRPGKLFIGGLNLETDEKALEAEFGKYGRIVEVLLMKDRETNKSRGFAFVTFESPADAKAAARDMNGKSLDGKAIKVAQATKPAFESSRRGPPPPRSRGRPRFLRGTRGGGGGPRRSPSRGGPDDDGGYTADFDLRPSRAPMPMKRGPPPRRVGPPPKRAAPSGPARSSGGGMRGRALAVRGRDGYSGPPRREPLPPRRDPYLGPRDEGYSSRDGYSSRDYREPRGFAPSPGEYTHRDYGHSSVRDDCPLRGYSDRDGYGGRDRDYGDHLSRGSHREPFESYGELRGAAPGRGTPPSYGGGGRYEEYRGYSPDAYSGGRDSYSSSYGRSDRYSRGRHRVGRPDRGLSLSMERGCPPQRDSYSRSGCRVPRGGGRLGGRLERGGGRSRY

SEQ ID NO: 4861 - protein, 1067 aa, Homo sapiens
MMEADRPEKLFIGGLNLKTDEKALKAEFGKYGHIIKVFLMKDRKTNKSRGFAFVTFESPADAKAAARDMNGKYLDGKAIMVAQTIKPAFKSSRWVPPTPGSGSRSRFSHRTRGGGSSPQRPPSQGRPDDGRGYAGYFDLWPYRAPMPRKRGPPPRHWASPPHKRATPSSLAHSVGCGMRGKAPTVSGQDGYSGLQPRRWAGPPHKRAVPRSSLARIGGSGMPGKAPAVWGQDGYSGPRVREPLPPCRDPGDFVPALRDYSRRYYGHSSVPDYRPLRGDGNQNGYRGRDHEYTDHPSKGSYREPLKSYGGPCGAAPVWGTPPSYGGGCRYEEYQGNSPDACSEGRSSEALPVVLPDAYSRDHSPKAYSGGRSSSSNGYSRSDRYGEEGCYEEYRGRSPDAHSGGRNSSSNSYGQSHHYGGEGRYEEYRGRSHEARSGGRSTDAHSRGRSDDAYSGGHDSSSWSDCCGGGGRYEEYQGRSLDANSGGCSPEAYSGGHDNSSWSDRYGVGGHYEENRGHSLDANSGGRSPDTHSGGHSSSSNSYGQSHRYGGEGRYEYRGRSHDAHSGGCSADAYSGGHDSSSQSNRYGGGGCYEEYRGRSLDANSGGRSPNAYSGGHDSSSWSHRYGGGGRYEEYRGRSLDANSGGRSPDAYSGGHDSSGQSNCYGGGGRYEEYRGRLLDANSGGRSPDAYSGGHDSSSQSNRYGGGGRYEEYRGHSLDANSGGRSPDTYSRGHDSSSQSDHYGGGGRSLDANSSGRLPDAYSGGHDSSSRSHRYGGGGRYEEYRGRSLDANSGGRSPNAYSGGHNSSSRNDPCRGGGRYEENRGHSLDANSGGHSPNAYSGGRDSSSNSYDRSHRYGGGGHYEEYRGRSHDTHSRGRSPDAHSGDHYTEAYSRGRDSFSNSYGRSDHYGRGGCYEEYQGRSPNAYGGGRGLNSSNNSHGRSHRYGGGGRYEEYRGPSPDAHSGGRDSSIKSYGLSDRYGGGGHYEEYQGSLPDAYSGDHDRSSNSYGRSDRYSRGRDRVGRPDRGLPLPMETGSPPLHDSYSRSGCRVPRGGGRQGGRFERGEGRSRY

SEQ ID NO: 4862 - protein, 496 aa, Homo sapiens
MVEADHPGKLFIGGLNRETNEKMLKAVFGKHGPISEVLLIKDRTSKSRGFAFITFENPADAKNAAKDMNGKSLHGKAIKVEQAKKPSFQSGGRRRPPASSRNRSPSGSLRSARGSRGGTRGWLPSHEGHLDDGGYTPDLKMSYSRGLIPVKRGPSSRSGGPPPKKSAPSAVARSNSWMGSQGPMSQRRENYGVPPRRATISSWRNDRMSTRHDGYATNDGNHPSCQETRDYAPPSRGYAYRDNGHSNRDEHSSRGYRNHRSSRETRDYAPPSRGHAYRDYGHSRRDESYSRGYRNRRSSRETREYAPPSRGHGYRDYGHSRRHESYSRGYRNHPSSRETRDYAPPHRDYAYRDYGHSSWDEHSSRGYSYHDGYGEALGRDHSEHLSGSSYRDALQRYGTSHGAPPARGPRMSYGGSTCHAYSNTRDRYGRSWESYSSCGDFHYCDREHVCRKDQRNPPSLGRVLPDPREACGSSSYVASIVDGGESRSEKGDSSRY

SEQ ID NO: 4863 - protein, 289 aa, Homo sapiens
MSTRHDGYATNDGNHPSCQETRDYAPPSRGYAYRDNGHSNRDEHSSRGYRNHRSSRETRDYAPPSRGHAYRDYGHSRRDESYSRGYRNRRSSRETREYAPPSRGHGYRDYGHSRRHESYSRGYRNHPSSRETRDYAPPHRDYAYRDYGHSSWDEHSSRGYSYHDGYGEALGRDHSEHLSGSSYRDALQRYGTSHGAPPARGPRMSYGGSTCHAYSNTRDRYGRSWESYSSCGDFHYCDREHVCRKDQRNPPSLGRVLPDPREACGSSSYVASIVDGGESRSEKGDSSRY

SEQ ID NO: 4864 - protein, 496 aa, Homo sapiens; identical to SEQ ID NO: 4862

SEQ ID NO: 4865 - protein, 496 aa, Homo sapiens
MVEADHPGKLFIGGLNRETNEKMLKAVFGKHGPISEVLLIKDRTSKSRGFAFITFENPADAKNAAKDMNGKSLHGKAIKVEQAKKPSFQSGGRRRPPASSRNRSPSGSLRSARGSRGGTRGWLPSQEGHLDDGGYTPDLKMSYSRGLIPVKRGPSSRSGGPPPKKSAPSAVARSNSWMGSQGPMSQRRENYGVPPRRATISSWRNDRMSTRHDGYATNDGNHPSCQETRDYAPPSRGYAYRDNGHSNRDEHSSRGYRNHRSSRETRDYAPPSRGHAYRDYGHSRRDESYSRGYRNRRSSRETREYAPPSRGHGYRDYGHSRRHESYSRGYRNHPSSRETRDYAPPHRDYAYRDYGHSSWDEHSSRGYSYHDGYGEALGRDHSEHLSGSSYRDALQRYGTSHGAPPARGPRMSYGGSTCHAYSNTRDRYGRSWESYSSCGDFHYCDREHVCRKDQRNPPSLGRVLPDPREAYGSSSYVASIVDGGESRSEKGDSSRY

SEQ ID NO: 4866 - protein, 459 aa, Homo sapiens
MVEADHPGKLFIGGLNRETNEKMLKAVFGKHGPISEVLLIKDRTSKSRGFAFITFENPADAKNAAKDMNGKSLHGKAIKVEQAKKPSFQSGGRRRPPASSRNRSPSGSLRSARGSRGGTRGWLPSQEGHLDDGGYTPDLKMSYSRGLIPVKRGPSSRSGGPPPKKSAPSAVARSNSWMGSQGPMSQRRENYGVPPRRATISSWRNDRMSTRHDGYATNDGNHPSCQETRDYAPPSRGYAYRDNGHSNRDEHSSRGYRNHRSSRETRDYAPPSRGHAYRDYGHSRRDESYSRGYRNRRSSRETREYAPPSRGHGYRDYGHSRRHESYSRGYSYHDGYGEALGRDHSEHLSGSSYRDALQRYGTSHGAPPARGPRMSYGGSTCHAYSNTRDRYGRSWESYSSCGDFHYCDREHVCRKDQRNPPSLGRVLPDPREACGSSSYVASIVDGGESRSEKGDSSRY

SEQ ID NO: 4867 - protein, 496 aa, Homo sapiens
MVEADHPGKLFIGGLNRETNEKMLKAVFGKHGPISEVLLIKDRTSKSRGFAFITFENPADAKNAAKDMNGKSLHGKAIKVEQAKKPSFQSGGRRRPPASSRNRSPSGSLRSARGSRGGTRGWLPSQEGHLDDGGYTPDLKMSYSRGLIPVKRGPSSRSGGPPPKKSAPSAVARSNSWMGSQGPMSQRRENYGVPPRRATISSWRNDRMSTRHDGYATNDGNHPSCQETRDYAPPSRGYAYRDNGHSNRDEHSSRGYRNHRSSRETRDYAPPSRGHAYRDYGHSRRDESYSRGYRNRRSSRETREYAPPSRGHGYRDYGHSRRHESYSRGYRNHPSSRETRDYAPPHRDYAYRDYGHSSWDEHSSRGYSYHDGYGEALGRDHSEHLSGSSYRDALQRYGTSHGAPPARGPRMSYGGSTCHAYSNTRDRYGRSWESYSSCGDFHYCDREHVCRKDQRNPPSLGRVLPDPREACGSSSYVASIVDGGESRSEKGDSSRY

SEQ ID NO: 4868 - protein, 496 aa, Homo sapiens; identical to SEQ ID NO: 4867

SEQ ID NO: 4869 - protein, 459 aa, Homo sapiens
MVEADHPGKLFIGGLNRETNEKMLKAVFGKHGPISEVLLIKDRTSKSRGFAFITFENPADAKNAAKDMNGKSLHGKAIKVEQAKKPSFQSGGRRRPPASSRNRSPSGSLRSARGSRGGTRGWLPSQEGHLDDGGYTPDLKMSYSRGLIPVKRGPSSRSGGPPPKKSAPSAVARSNSWMGSQGPMSQRRENYGVPPRRATISSWRNDRMSTRHDGYATNDGNHPSCQETRDYAPPSRGYAYRDNGHSNRDEHSSRGYRNHRSSRETRDYAPPSRGHAYRDYGHSRRDESYSRGYRNRRSSRETREYAPPSRGHGYRDYGHSRRHESYSRGYSYHDGYGEALGRDHSEHLSGSSYRDALQRYGTAHGAPPARGPRMSYGGSTCHAYSNTRDRYGRSWESYSSCGDFHYCDREHVCRKDQRNPPSLGRVLPDPREACGSSSYVASIVDGGESRSEKGDSSRY

SEQ ID NO: 4870 - protein, 496 aa, Homo sapiens
MVEADHPGKLFIGGLNRETNEKMLKAVFGKHGPISEVLLIKDRTSKSRGFAFITFENPADAKNAAKDMNGKSLHGKAIKVEQAKKPSFQSGGRRRPPASSRNRSPSGSLRSARGSRGGTRGWLPSQEGHLDDGGYTPDLKMSYSRGLIPVKRGPSSRSGGPPPKKSAPSAVARSNSWMGSQGPMSQRRENYGVPPRRATISSWRNDRMSTRHDGYATNDGNHPSCQETRDYAPPSRGYAYRDNGHSNRDEHSSRGYRNHRSSRETRDYAPPSRGHAYRDYGHSRRDESYSRGYRNRRSSRETREYAPPSRGHGYRDYGHSRRHESYSRGYRNHPSSRETRDYAPPHRDYAYRDYGHSSWDEHSSRGYSYHDGYGEALGRDHSEHLSGSSYRDALQRYGTAHGAPPARGPRMSYGGSTCHAYSNTRDRYGRSWESYSSCGDFHYCDREHVCRKDQRNPPSLGRVLPDPREACGSSSYVASIVDGGESRSEKGDSSRY

SEQ ID NO: 4871 - protein, 496 aa, Homo sapiens; identical to SEQ ID NO: 4867

SEQ ID NO: 4872 - protein, 496 aa, Homo sapiens
MVEADHPGKLFIGGLNRETNEKMLKAVFGKHGPISEVLLIKDRTSKSRGFAFITFENPADAKNAAKDMNGTSLHGKAIKVEQAKKPSFQSGGRRRPPASSRNRSPSGSLRSARGSSGGTRGWLPSHEGHLDDGGYTPDLKMSYSRGLIPVKRGPSSRSGGPPPKKSAPSAVARSNSWMGSQGPMSQRRENYGVPPRRATISSWRNDRMSTRHDGYATNDGNHPSCQETRDYAPPSRGYAYRDNGHSNRDEHSSRGYRNHRSSRETRDYAPPSRGHAYRDYGHSRRDESYSRGYRNHRSSRETREYAPPSRGHGYRDYGHSRRHESYSRGYRNHPSSRETRDYAPPHRDYAYRDYGHSSWDEHSSRGYSYHDGYGEALGRDHSEHLSGSSYRDALQRYGTSHGAPPARGPRMSYGGSTCHAYSNTRDRYGRSWESYSSCGDFHYCDREHVCRKDQRNPPSLGRVLPDPREAYGSSSYVASIVDGGESRSEKGDSSRY

SEQ ID NO: 4873 - protein, 459 aa, Homo sapiens
MVEADHPGKLFIGGLNRETNEKMLKAVFGKHGPISEVLLIKDRTSKSRGFAFITFENPADAKNAAKDMNGTSLHGKAIKVEQAKKPSFQSGGRRRPPASSRNRSPSGSLRSARGSSGGTRGWLPSHEGHLDDGGYTPDLKMSYSRGLIPVKRGPSSRSGGPPPKKSAPSAVARSNSWMGSQGPMSQRRENYGVPPRRATISSWRNDRMSTRHDGYATNDGNHPSCQETRDYAPPSRGYAYRDNGHSNRDEHSSRGYRNHRSSRETRDYAPPSRGHAYRDYGHSRRDESYSRGYRNHRSSRETREYAPPSRGHGYRDYGHSRRHESYSRGYSYHDGYGEALGRDHSEHLSGSSYRDALQRYGTSHGAPPARGPRMSYGGSTCHAYSNTRDRYGRSWESYSSCGDFHYCDREHVCRKDQRNPPSLGRVLPDPREAYGSSSYVASIVDGGESRSEKGDSSRY

SEQ ID NO: 4874 - protein, 496 aa, Homo sapiens; identical to SEQ ID NO: 4872

SEQ ID NO: 4875 - protein, 496 aa, Homo sapiens; identical to SEQ ID NO: 4872

SEQ ID NO: 4876 - protein, 459 aa, Homo sapiens; identical to SEQ ID NO: 4873

SEQ ID NO: 4877 - protein, 406 aa, Homo sapiens
MGKVWKQQMYPQYATYYYPQYLQAKQSLVPAHPMAPPSPSTTSSNNNSSSSSNSGWDQLSKTNLYIRGLPPHTTDQDLVKLCQPYGKIVSTKAILDKTTNKCKGYGFVDFDSPAAAQKAVSALKASGVQAQMAKQQEQDPTNLYISNLPLSMDEQELENMLKPFGQVISTRILRDSSGTSRGVGFARMESTEKCEAVIGHFNGKFIKTPPGVSAPTEPLLCKFADGGQKKRQNPNKYIPNGRPWHREGEVRLAGMTLTYDPTTAAIQNGFYPSPYSIATNRMITQTSITPYIASPVSAYQVQSPSWMQPQPYILQHPGAVLTPSMEHTMSLQPASMISPLAQQMSHLSLGSTGTYMPATSAMQGAYLPQYAHMQTTAVPVEEASGQQQVAVETSNDHSPYTFQPNK

SEQ ID NO: 4878 - protein, 128 aa, Homo sapiens
MAPPSPSTTSSNNNSSSSSNSGWDQLSKTNLYIRGLPPHTTDQDLVKLCQPYGKIVSTKAILDKTTNKCKGYGFVDFDSPAAAQKAVSALKASGVQAQMAKQQEQDPTNLYISNLPLSMDEQELENML

SEQ ID NO: 4879 - protein, 370 aa, Homo sapiens
MAPPSPSTTSSNNNSSSSSNSGWDQLSKTNLYIRGLPPHTTDQDLVKLCQPYGKIVSTKAILDKTTNKCKGYGFVDFDSPAAAQKAVSALKASGVQAQMAKQQEQDPTNLYISNLPLSMDEQELENMLKPFGQVISTRILRDSSGTSRGVGFARMESTEKCEAVIGHFNGKFIKTPPGVSAPTEPLLCKFADGGQKKRQNPNKYIPNGRPWHREGEAGMTLTYDPTTAAIQNGFYPSPYSIATNRMITQTSITPYIASPVSAYQVQSPSWMQPQPYILQHPGAVLTPSMEHTMSLQPASMISPLAQQMSHLSLGSTGTYMPATSAMQGAYLPQYAHMQTTAVPVEEASGQQQVAVETSNDHSPYTFQPNK

SEQ ID NO: 4880 - protein, 370 aa, Homo sapiens; identical to SEQ ID NO: 4879

SEQ ID NO: 4881 - protein, 419 aa, Homo sapiens
MGKVWKQQMYPQYATYYYPQYLQAKQSLVPAHPMAPPSPSTTSSNNNSSSSSNSGWDQLSKTNLYIRGLPPHTTDQDLVKLCQPYGKIVSTKAILDKTTNKCKGYGFVDFDSPAAAQKAVSALKASGVQAQMAKQQEQDPTNLYISNLPLSMDEQELENMLKPFGQVISTRILRDSSGTSRGVGFARMESTEKCEAVIGHFNGKFIKTPPGVSAPTEPLLCKFADGGQKKRQNPNKYIPNGRPWHREGEAGMTLTYDPTTAAIQNGFYPSPYSIATNRMITQTSITPYIASPVSAYQVAKETRENKYRGSAIKVQSPSWMQPQPYILQHPGAVLTPSMEHTMSLQPASMISPLAQQMSHLSLGSTGTYMPATSAMQGAYLPQYAHMQTTAVPVEEASGQQQVAVETSNDHSPYTFQPNK

SEQ ID NO: 4882 - protein, 370 aa, Homo sapiens; identical to SEQ ID NO: 4879

SEQ ID NO: 4883 - protein, 407 aa, Homo sapiens
MLLSVTSRPGISTFGYNRNNKKPYVSLAQQMAPPSPSNSTPNSSSGSNGNDQLSKTNLYIRGLQPGTTDQDLVKLCQPYGKIVSTKAILDKTTNKCKGYGFVDFDSPSAAQKAVTALKASGVQAQMAKQQEQDPTNLYISNLPLSMDEQELEGMLKPFGQVISTRILRDTSGTSRGVGFARMESTEKCEAIITHFNGKYIKTPPGVPAPSDPLLCKFADGGPKKRQNQGKFVQNGRAWPRNADMGVMALTYDPTTALQNGFYPAPYNITPNRMLAQSALSPYLSSPVSSYQRVTQTSPLQVPNPSWMHHHSYLMQPSGSVLTPGMDHPISLQPASMMGPLTQQLGHLSLSSTGTYMPTAAAMQGAYISQYTPVPSSSVSVEESSGQQNQVAVDAPSEHGVYSFQFNK

SEQ ID NO: 4884 - protein, 436 aa, Homo sapiens
MGKRLDQPQMYPQYTYYYPHYLQTKSYAPAPHPMAPPSPSTNSSSNNSSNNSSGEQLSKTNLYIRGLPPGTTDQDLIKLCQPYGKIVSTKAILDKNTNQCKGYGFVDFDSPAAAQKAVASLKANGVQAQMAKQQEQDPTNLYISNLPISMDEQELENMLKPFGHVISTRILRDANGVSRGVGFARMESTEKCEVVIQHFNGKYLKTPPGIPAPSEPLLCKFADGGQKKRQNQSKYTQNGRPWPREGEAGMALTYDPTAAIQNGFYSSPYSIATNRMIPQTSITPFIAASPVSTYQVQSTSWMPHPPYVMQPTGAVITPTMDHPMSMQPANMMGPLTQQMNHLSLGTTGTIQSQDRIMILHQLLCQYMTAAAPMQGTYIPQYTPVPPTAVSIEGVVADTSPQTVAPSSQDTSGQQQQIAVDTSNEHAPAYSYQQSKP

SEQ ID NO: 4885 - protein, 437 aa, Homo sapiens
MGKRLDQPQMYPQYTYYYPHYLQTKQSYAPAPHPMAPPSPSTNSSSNNSSNNSSGEQLSKTNLYIRGLPPGTTDQDLIKLCQPYGKIVSTKAILDKNTNQCKGYGFVDFDSPAAAQKAVASLKANGVQAQMAKQQEQDPTNLYISNLPISMDEQELENMLKPFGHVISTRILRDANGVSRGVGFARMESTEKCEVVIQHFNGKYLKTPPGIPAPSEPLLCKFADGGQKKRQNQSKYTQNGRPWPREGEAGMALTYDPTAAIQNGFYSSPYSIATNRMIPQTSITPFIAASPVSTYQVQSTSWMPHPPYVMQPTGAVITPTMDHPMSMQPANMMGPLTQQMNHLSLGTTGTIQSQDRIMILHQLLCQYMTAAAPMQGTYIPQYTPVPPTAVSIEGVVADTSPQTVAPSSQDTSGQQQQIAVDTSNEHAPAYSYQQSKP

SEQ ID NO: 4886 - protein, 419 aa, Homo sapiens
MGKRLDQPQMYPQYTYYYPHYLQTKSYAPAPHPMAPPSPSTNSSSNNSSNNSSGEQLSKTNLYIRGLPPGTTDQDLIKLCQPYGKIVSTKAILDKNTNQCKGYGFVDFDSPAAAQKAVASLKANGVQAQMAKQQEQDPTNLYISNLPISMDEQELENMLKPFGHVISTRILRDANGVSRGVGFARMESTEKCEVVIQHFNGKYLKTPPGIPAPSEPLLCKFADGGQKKRQNQSKYTQNGRPWPREGEAGMALTYDPTAAIQNGFYSSPYSIATNRMIPQTSITPFIAASPVSTYQGAVITPTMDHPMSMQPANMMGPLTQQMNHLSLGTTGTIQSQDRIMILHQLLCQYMTAAAPMQGTYIPQYTPVPPTAVSIEGVVADTSPQTVAPSSQDTSGQQQQIAVDTSNEHAPAYSYQQSKP

SEQ ID NO: 4887 - protein, 433 aa, Homo sapiens
MGKRLDQPQMYPQYTYYYPHYLQTKQSYAPAPHPMAPPSPSTNSSSNNSSNNSSGEQLSKTNLYIRGLPPGTTDQDLIKLCQPYGKIVSTKAILDKNTNQCKGYGFVDFDSPAAAQKAVASLKANGVQAQMAKQQEQDPTNLYISNLPISMDEQELENMLKPFGHVISTRILRDANGVSRGVGFARMESTEKCEVVIQHFNGKYLKTPPGIPAPSEPLLCKFADGGQKKRQNQSKYTQNGRPWPREGEVLRGRTVPRQNREAGMALTYDPTAAIQNGFYSSPYSIATNRMIPQTSITPFIAASPVSTYQVQSTSWMPHPPYVMQPTGAVITPTMDHPMSMQPANMMGPLTQQMNHLSLGTTGTYMTAAAPMQGTYIPQYTPVPPTAVSIEGVVADTSPQTVAPSSQDTSGQQQQIAVDTSNEHAPAYSYQQSK

SEQ ID NO: 4888 - protein, 434 aa, Homo sapiens
MGKRLDQPQMYPQYTYYYPHYLQTKQSYAPAPHPMAPPSPSTNSSSNNSSNNSSGEQLSKTNLYIRGLPPGTTDQDLIKLCQPYGKIVSTKAILDKNTNQCKGYGFVDFDSPAAAQKAVASLKANGVQAQMAKQQEQDPTNLYISNLPISMDEQELENMLKPFGHVISTRILRDANGVSRGVGFARMESTEKCEVVIQHFNGKYLKTPPGIPAPSEPLLCKFADGGQKKRQNQSKYTQNGRPWPREGEVLRGRTVPRQNREAGMALTYDPTAAIQNGFYSSPYSIATNRMIPQTSITPFIAASPVSTYQVQSTSWMPHPPYVMQPTGAVITPTMDHPMSMQPANMMGPLTQQMNHLSLGTTGTYMTAAAPMQGTYIPQYTPVPPTAVSIEGVVADTSPQTVAPSSQDTSGQQQQIAVDTSNEHAPAYSYQQSKP

SEQ ID NO: 4889 - protein, 420 aa, Homo sapiens
MGKRLDQPQMYPQYTYYYPHYLQTKQSYAPAPHPMAPPSPSTNSSSNNSSNNSSGEQLSKTNLYIRGLPPGTTDQDLIKLCQPYGKIVSTKAILDKNTNQCKGYGFVDFDSPAAAQKAVASLKANGVQAQMAKQQEQDPTNLYISNLPISMDEQELENMLKPFGHVISTRILRDANGVSRGVGFARMESTEKCEVVIQHFNGKYLKTPPGIPAPSEPLLCKFADGGQKKRQNQSKYTQNGRPWPREGEAGMALTYDPTAAIQNGFYSSPYSIATNRMIPQTSITPFIAASPVSTYQVQSTSWMPHPPYVMQPTGAVITPTMDHPMSMQPANMMGPLTQQMNHLSLGTTGTYMTAAAPMQGTYIPQYTPVPPTAVSIEGVVADTSPQTVAPSSQDTSGQQQQIAVDTSNEHAPAYSYQQSK

SEQ ID NO: 4890 - protein, 305 aa, Homo sapiens
MDLSGVKKKSLLGVKENNKKSSTRAPSPTKRKDRSDEKSKDRSKDKGATKESSEKDRGRDKTRKRRSASSGSSSTRSRSSSTSSSGSSTSTGSSSGSSSSSASSRSGSSSTSRSSSSSSSSGSPSPSRRRHDNRRRSRSKSKPPKRDEKERKRRSPSPKPTKVHIGRLTRNVTKDHIMEIFSTYGKIKMIDMPVERMHPHLSKGYAYVEFENPDEAEKALKHMDGGQIDGQEITATAVLAPWPRPPPRRFSPPRRMLPPPPMWRRSPPRMRRRSRSPRRRSPVRRRSRSPGRRRHRSRSSSNSSR

SEQ ID NO: 4891 - protein, 305 aa, Homo sapiens; identical to SEQ ID NO: 4890

SEQ ID NO: 4892 - protein, 305 aa, Homo sapiens; identical to SEQ ID NO: 4890

SEQ ID NO: 4893 - protein, 196 aa, Homo sapiens
MNNGGKAEKENTPSEANLQEEEVRTLFVSGLPLDIKPRELYLLFRPFKGYEGSLIKLTSKQPVGFVSFDSRSEAEAAKNALNGIRFDPEIPQTLRLEFAKANTKMAKNKLVGTPNPSTPLPNTVPQFIAREPYELTVPALYPSSPEVWAPYPLYPAELAPALPPPAFTYPASLHAQMRWLPPSEATSQGWKSRQFC

SEQ ID NO: 4894 - protein, 204 aa, Homo sapiens
MNNGGKAEKENTPSEANLQEEEVRTLFVSGLPLDIKPRELYLLFRPFKGYEGSLIKLTSKQPVGFVSFDSRSEAEAAKNALNGIRFDPEIPQTLRLEFAKANTKMAKNKLVGTPNPSTPLPNTVPQFIAREPYELTVPALYPSSPEVWAPYPLYPAELAPALPPPAFTYPASLHAQLCEGQTVRRSHPLSAPSPDSASLAWFPV

SEQ ID NO: 4895 - protein, 219 aa, Homo sapiens
MNNGGKAEKENTPSEANLQEEEVRTLFVSGLPLDIKPRELYLLFRPFKGYEGSLIKLTSKQPVGFVSFDSRSEAEAAKNALNGIRFDPEIPQTLRLEFAKANTKMAKNKLVGTPNPSTPLPNTVPQFIAREPYELTVPALYPSSPEVWAPYPLYPAELAPALPPPAFTYPASLHAQCFSPEAKPNTPVFCPLLQQIRFVSGNVFVTYQPTADQQRELPC

SEQ ID NO: 4896 - protein, 153 aa, Homo sapiens
MNNGGKAEKENTPSEANLQEEEVRTLFVSGLPLDIKPRELYLLFRPFKGYEGSLIKLTSKQPVGFVSFDSRSEAEAAKNALNGIRFDPEIPQTLRLEFAKANTKMAKNKLVGTPNPSTPLPNTVPQFIAREPLMRWLPPSEATSQGWKSRQFC

SEQ ID NO: 4897 - protein, 196 aa, Homo sapiens; identical to SEQ ID NO: 4893

SEQ ID NO: 4898 - protein, 209 aa, Homo sapiens
MSNLKPDGEHGGSTGTGSGAGSGGALEEEVRTLFVSGLPVDIKPRELYLLFRPFKGYEGSLIKLTARQPVGFVIFDSRAGAEAAKNALNGIRFDPENPQTLRLEFAKANTKMAKSKLMATPNPSNVHPALGAHFIARDPYDLMGAALIPASPEAWAPYPLYTTELTPAISHAAFTYPTATAAAAALHAQVRWYPSSDTTQQGWKYRQFC

SEQ ID NO: 4899 - protein, 306 aa, Homo sapiens
MSLKLQASNVTNKNDPKSINSRVFIGNLNTALVKKSDVETIFSKYGRVAGCSVHKGYAFVQYSNERHARAAVLGENGRVLAGQTLDINMAGEPKPDRPKGLKRAASAIYSGYIFDYDYYRDDFYDRLFDYRGRLSPVPVPRAVPVKRPRVTVPLVRRVKTNVPVKLFARSTAVTTSSAKIKLKSSELQAIKTELTQIKSNIDALLSRLEQIAAEQKANPDGKKKGDGGGAGGGGGGGGSGGGGSGGGGGGGSSRPPAPQENTTSEAGLPQGEARTRDDGDEEGLLTHSEEELEHSQDTDADDGALQ

SEQ ID NO: 4900 - protein, 237 aa, Homo sapiens
MSLKLQASNVTNKNDPKSINSRVFIGNLNTALVKKSDVETIFSKYGRVAGCSVHKGYAFVQYSNERHARAAVLGENGRVLAGQTLDINMAGEPKPDRPKGLKRAASAIYRLFDYRGRLSPVPVPRAVPVKRPRVTVPLVRRVKTNVPVKLFARSTAVTTSSAKIKLKSSELQAIKTELTQIKSNIDALLSRLEQIAAEQKANPDGKKKGDGGGAGGGGGGGGSGGGGSGGGGGGGSS

SEQ ID NO: 4901 - protein, 181 aa, Homo sapiens
MSLKLQASNVTNKNDPKSINSRVFIGNLNTALVKKSDVETIFSKYGRVAGCSVHKGYAFVQYSNERHARAAVLGENGRVLAGQTLDINMAGEPKPDRPKGLKRAASAIYSGYIFDYDYYRDDFYDRLFDYRGRLSPVPVPRAVPVKRPRVTVPLVRRVKTNVPVKLFARSTAVTTSSAKIK

SEQ ID NO: 4902 - protein, 89 aa, Homo sapiens
MSLKLQASNVTNKNDPKSINSRVFIGNLNTALVKKSDVETIFSKYGRVAGCSVHKGYAFVQYSNERHARAAVLGENGRVLAGQTLDINM

SEQ ID NO: 4903 - protein, 290 aa, Homo sapiens
MSLKLQASNVTNKNDPKSINSRVFIGNLNTALVKKSDVETIFSKYGRVAGCSVHKGYAFVQYSNERHARAAVLGENGRVLAGQTLDINMAGEPKPDRPKGLKRAASAIYRLFDYRGRLSPVPVPRAVPVKRPRVTVPLVRRVKTNVPVKLFARSTAVTTSSAKIKLKSSELQAIKTELTQIKSNIDALLSRLEQIAAEQKANPDGKKKGDGGGAGGGGGGGGSGGGGSGGGGGGGSSRPPAPQENTTSEAGLPQGEARTRDDGDEEGLLTHSEEELEHSQDTDADDGALQ

SEQ ID NO: 4904 - protein, 418 aa, Homo sapiens
MLASQGVLLHPYGVPMIVPAAPYLPGLIQGNQEAAAAPDTMAQPYASAQFAPPQNGIPAEYTAPHPHPAPEYTGQTTVPEHTLNLYPPAQTHSEQSPADTSAQTVSGTATQTDDAAPTDGQPQTQPSENTENKSQPKRLHVSNIPFRFRDPDLRQMFGQFGKILDVEIIFNERGSKGFGFVTFENSADADRAREKLHGTVVEGRKIEVNNATARVMTNKKTVNPYTNGWKLNPVVGAVYSPEFYAGTVLLCQANQEGSSMYSAPSSLVYTSAMPGFPYPAATAAAAYRGAHLRGRGRTVYNTFRAAAPPPPIPAYGGVVYQEPVYGNKLLQGGYAAYRYAQPTPATAAAYSDSYGRVYAADPYHHALAPAPTYGVGAMNAFAPLTDAKTRSHADDVGLVLSSLQASIYRGGYNRFAPY

SEQ ID NO: 4905 - protein, 397 aa, Homo sapiens
MNCEREQLRGNQEAAAAPDTMAQPYASAQFAPPQNGIPAEYTAPHPHPAPEYTGQTTVPEHTLNLYPPAQTHSEQSPADTSAQTVSGTATQTDDAAPTDGQPQTQPSENTENKSQPKRLHVSNIPFRFRDPDLRQMFGQFGKILDVEIIFNERGSKGFGFVTFENSADADRAREKLHGTVVEGRKIEVNNATARVMTNKKTVNPYTNGWKLNPVVGAVYSPEFYAGTVLLCQANQEGSSMYSAPSSLVYTSAMPGFPYPAATAAAAYRGAHLRGRGRTVYNTFRAAAPPPPIPAYGGVVYQDGFYGADIYGGYAAYRYAQPTPATAAAYSDSYGRVYAADPYHHALAPAPTYGVGAMNAFAPLTDAKTRSHADDVGLVLSSLQASIYRGGYNRFAPY

SEQ ID NO: 4906 - protein, 395 aa, Homo sapiens
MLASQGVLLHPYGVPMIVPAAPYLPGLIQGNQEAAAAPDTMAQPYASAQFAPPQNGIPAEYTAPHPHPAPEYTGQTTVPEHTLNLYPPAQTHSEQSPADTSAQTVSGTATQTDDAAPTDGQPQTQPSENTENKSQPKRLHVSNIPFRFRDPDLRQMFGQFGKILDVEIIFNERGSKGFGFVTFENSADADRAREKLHGTVVEGRKIEVNNATARVMTNKKTVNPYTNGWKLNPVVGAVYSPEFYAGTVLLCQANQEGSSMYSAPSSLVYTSAMPGFPYPAATAAAAYRGAHLRGRGRTVYNTFRAAAPPPPIPAYGGVVYQEPVYGNKLLQGGYAAYRYAQPTPATAAAYSDRNQFVFVAADEISCNTSAVTDEFMLPTPTTTHLLQPPPTALVP

SEQ ID NO: 4907 - protein, 370 aa, Homo sapiens
MNCEREQLRGNQEAAAAPDTMAQPYASAQFAPPQNGIPAEYTAPHPHPAPEYTGQTTVPEHTLNLYPPAQTHSEQSPADTSAQTVSGTATQTDDAAPTDGQPQTQPSENTENKSQPKRLHVSNIPFRFRDPDLRQMFGQFGKILDVEIIFNERGSKGFGFVTFENSADADRAREKLHGTVVEGRKIEVNNATARVMTNKKTVNPYTNGWKLNPVVGAVYSPEFYAVPGFPYPAATAAAAYRGAHLRGRGRTVYNTFRAAAPPPPIPAYGGVVYQDGFYGADIYGGYAAYRYAQPTPATAAAYSDSYGRVYAADPYHHALAPAPTYGVGAMNAFAPLTDAKTRSHADDVGLVLSSLQASIYRGGYNRFAPY

SEQ ID NO: 4908 - protein, 392 aa, Homo sapiens
MLASQGVLLHPYGVPMIVPAAPYLPGLIQGNQEAAAAPDTMAQPYASAQFAPPQNGIPAEYTAPHPHPAPEYTGQTTVPEHTLNLYPPAQTHSEQSPADTSAQTVSGTATQTDDAAPTDGQPQTQPSENTENKSQPKRLHVSNIPFRFRDPDLRQMFGQFGKILDVEIIFNERGSKGFGFVTFENSADADRAREKLHGTVVEGRKIEVNNATARVMTNKKTVNPYTNGWKLNPVVGAVYSPEFYAGTVLLCQANQEGSSMYSAPSSLVYTSAMPGFPYPAATAAAAYRGAHLRGRGRTVYNTFRAAAPPPPIPAYGGVVYQEPVYGNKLLQGGYAAYRYAQPTPATAAAYSDSYGRVYAADPYHHALAPAPTYGVGAMASIYRGGYNRFAPY

SEQ ID NO: 4909 - protein, 391 aa, Homo sapiens
MLASQGVLLHPYGVPMIVPAAPYLPGLIQGNQEAAAAPDTMAQPYASAQFAPPQNGIPAEYTAPHPHPAPEYTGQTTVPEHTLNLYPPAQTHSEQSPADTSAQTVSGTATQTDDAAPTDGQPQTQPSENTENKSQPKRLHVSNIPFRFRDPDLRQMFGQFGKILDVEIIFNERGSKGFGFVTFENSADADRAREKLHGTVVEGRKIEVNNATARVMTNKKTVNPYTNGWKLNPVVGAVYSPEFYAVPGFPYPAATAAAAYRGAHLRGRGRTVYNTFRAAAPPPPIPAYGGVVYQEPVYGNKLLQGGYAAYRYAQPTPATAAAYSDSYGRVYAADPYHHALAPAPTYGVGAMNAFAPLTDAKTRSHADDVGLVLSSLQASIYRGGYNRFAPY

SEQ ID NO: 4910 - protein, 402 aa, Homo sapiens
MIVPAAPYLPGLIQGNQEAAAAPDTMAQPYASAQFAPPQNGIPAEYTAPHPHPAPEYTGQTTVPEHTLNLYPPAQTHSEQSPADTSAQTVSGTATQTDDAAPTDGQPQTQPSENTENKSQPKRLHVSNIPFRFRDPDLRQMFGQFGKILDVEIIFNERGSKGFGFVTFENSADADRAREKLHGTVVEGRKIEVNNATARVMTNKKTVNPYTNGWKLNPVVGAVYSPEFYAGTVLLCQANQEGSSMYSAPSSLVYTSAMPGFPYPAATAAAAYRGAHLRGRGRTVYNTFRAAAPPPPIPAYGGVVYQDGFYGADIYGGYAAYRYAQPTPATAAAYSDSYGRVYAADPYHHALAPAPTYGVGAMNAFAPLTDAKTRSHADDVGLVLSSLQASIYRGGYNRFAPY

SEQ ID NO: 4911 - protein, 397 aa, Homo sapiens; identical to SEQ ID NO: 4905

SEQ ID NO: 4912 - protein, 466 aa, Homo sapiens
METGQRTHASGTYSFLDRTQHSDIKADCNTCVEIEDRKVSRQQMNCEREQLRGNQEAAAAPDTMAQPYASAQFAPPQNGIPAEYTAPHPHPAPEYTGQTTVPEHTLNLYPPAQTHSEQSPADTSAQTVSGTATQTDDAAPTDGQPQTQPSENTENKSQPKRLHVSNIPFRFRDPDLRQMFGQFGKILDVEIIFNERGSKGFGFVTFENSADADRAREKLHGTVVEGRKIEVNNATARVMTNKKTVNPYTNGWKLNPVVGAVYSPEFYAGTVLLCQANQEGSSMYSAPSSLVYTSAMPGFPYPAATAAAAYRGAHLRGRGRTVYNTFRAAAPPPPIPAYGGVVYQDGFYGADIYGGYAAYRYAQPTPATAAAYSDRNQFVFVAADEISCNTSAVTDEFMLPTPTTTHLLQPPPTALVPCPKVPAPAQTSEELSCTLPGLCCQAAENLTASPPLLQFMFKVIVAQERK

SEQ ID NO: 4913 - protein, 263 aa, Homo sapiens
MNCEREQLRGNQEAAAAPDTMAQPYASAQFAPPQNGIPAEYTAPHPHPAPEYTGQTTVPEHTLNLYPPAQTHSEQSPADTSAQTVSGTATQTDDAAPTDGQPQTQPSENTENKSQPKRLHVSNIPFRFRDPDLRQMFGQFGKILDVEIIFNERGSKGFGFVTFENSADADRAREKLHGTVVEGRKIEVNNATARVMTNKKTVNPYTNGWKLNPVVGAVYSPEFYAGTVLLCQANQEGSSMYSAPSSLVYTSAMPGFPYPAATA

SEQ ID NO: 4914 - protein, 357 aa, Homo sapiens
MVQPFTTIPFPPPPQNGIPTEYGVPHTQDYAGQTGEHNLTLYGSTQAHGEQSSNSPSTQNGSLTQTEGGAQTDGQQSQTQSSENSESKSTPKRLHVSNIPFRFRDPDLRQMFGQFGKILDVEIIFNERGSKGFGFVTFENSADADRAREKLHGTVVEGRKIEVNNATARVMTNKKMVTPYANGWKLSPVVGAVYGPELYAASSFQADVSLGNDAAVPLSGRGGINTYIPLIIPGFPYPTAATTAAAFRGAHLRGRGRTVYGAVRAVPPTAIPAYPGVVYQDGFYGADLYGGYAAYRYAQPATATAATAAAAAAAAYSDGYGRVYTADPYHALAPAASYGVGAVASLYRGGYSRFAPY

SEQ ID NO: 4915 - protein, 128 aa, Homo sapiens
MVQPFTTIPFPPPPQNGIPTEYGVPHTQDYAGQTGEHNLTLYGSTQAHGEQSSNSPSTQNGSLTTEGGAQTDGQQSQTQSSENSESKSTPKRLHVSNIPFRFRDPDLRQMFGFGKILDVEIIFNERGS

SEQ ID NO: 4916 - protein, 400 aa, Homo sapiens
MKNEPLTPGYHGFPARDSQGNQEPTTTPDAMVQPFTTIPFPPPPQNGIPTEYGVPHTQDYAGQTGEHNLTLYGSTQAHGEQSSNSPSTQNGSLTTEGGAQTDGQQSQTQSSENSESKSTPKRLHVSNIPFRFRDPDLRQMFGQFGKILDVEIIFNERGSKGFGFVTFENSADADRAREKLHGTVVEGRKIEVNNATARVMTNKKMVTPYANGWKLSPVVGAVYGPELYAASSFQADVSLGNDAAVPLSGRGGINTYIPLIIPGFPYPTAATTAAAFRGAHLRGRGRTVYGAVRAVPPTAIPAYPGVVYQDGFYGADLYIESANCFRSNRVDMQPTDMHSLLLQPQPPLLQPLQPLTVTVMAGCTQPTPTMPLPLPLAMELALWRVYTEVATADLPPTEVT

SEQ ID NO: 4917 - protein, 200 aa, Homo sapiens
MSSDSMDQPRNPCENEPLTPGYHGFPARDSQGNQEPTTTPDAMVQPFTTIPFPPPPQNGIPTEYGVPHTQDYAGQTGEHNLTLYGSTQAHGEQSSNSPSTQNGSLTQTEGGAQTDGQQSQTQSSENSESKSTPKRLHVSNIPFRFRDPDLRQMFGQFGKILDVEIIFNERGSKGFGFVTFENSADADRAREKLHGTVVEG

SEQ ID NO: 4918 - protein, 451 aa, Homo sapiens
MAEGAQPHQPPQLGPGAAARGMKRESELELPVPGAGGDGADPGLSKRPRTEEAAADGGGGMQNEPLTPGYHGFPARDSQGNQEPTTTPDAMVQPFTTIPFPPPPQNGIPTEYGVPHTQDYAGQTGEHNLTLYGSTQAHGEQSSNSPSTQNGSLTQTEGGAQTDGQQSQTQSSENSESKSTPKRLHVSNIPFRFRDPDLRQMFGQFGKILDVEIIFNERGSKGFGFVTFENSADADRAREKLHGTVVEGRKIEVNNATARVMTNKKMVTPYANGWKLSPVVGAVYGPELYAASSFQADVSLGNDAAVPLSGRGGINTYIPLISLPLVPGFPYPTAATTAAAFRGAHLRGRGRTVYGAVRAVPPTAIPAYPGVVYQDGFYGADLYGGYAAYRYAQPATATAATAAAAAAAAYSDGYGRVYTADPYHALAPAASYGVGAVASLYRGGYSRFAPY

SEQ ID NO: 4919 - protein, 370 aa, Homo sapiens
MVQPFTTIPFPPPPQNGIPTEYGVPHTQDYAGQTGEHNLTLYGSTQAHGEQSSNSPSTQNGSLTTEGGAQTDGQQSQTQSSENSESKSTPKRLHVSNIPFRFRDPDLRQMFGQFGKILDVEIIFNERGSKGFGFVTFENSADADRAREKLHGTVVEGRKIEVNNATARVMTNKKMVTPYANGWKLSPVVGAVYGPELYAASSFQADVSLGNDAAVPLSGRGGINTYIPLIIPGFPYPTAATTAAAFRGAHLRGRGRTVYGAVRAVPPTAIPAYPGVVYQDGFYGADLYIESANCFRSNRVDMQPTDMHSLLLQPQPPLLQPLQPLTVTVMAGCTQPTPTMPLPLPLAMELALWRVYTEVATADLPPTEVT

SEQ ID NO: 4920 - protein, 358 aa, Homo sapiens
MEKKKMVTQGNQEPTTTPDAMVQPFTTIPFPPPPQNGIPTEYGVPHTQDYAGQTGEHNLTLYGSTQAHGEQSSNSPSTQNGSLTTEGGAQTDGQQSQTQSSENSESKSTPKRLHVSNIPFRFRDPDLRQMFGGFGFVTFENSADADRAREKLHGTVVEGRKIEVNNATARVMTNKKMVTPYANGWKLSPVVGAVYGPELYAASSFQADVSLGNDAAVPLSGRGGINTYIPLIIPGFPYPTAATTAAAFRGAHLRGRGRTVYGAVRAVPPTAIPAYPGVVYQDGFYGADLYGGYAAYRYAQPATATAATAAAAAAAAYSDGYGRVYTADPYHALAPAASYGVGAVASLYRGGYSRFAPY

SEQ ID NO: 4921 - protein, 367 aa, Homo sapiens
MEKKKMVTQGNQEPTTTPDAMVQPFTTIPFPPPPQNGIPTEYGVPHTQDYAGQTGEHNLTLYGSTQAHGEQSSNSPSTQNGSLTQTEGGAQTDGQQSQTQSSENSESKSTPKRLHVSNIPFRFRDPDLRQMFGQFGKILDVEIIFNERGSKGFGFVTFENSADADRAREKLHGTVVEGRKIEVNNATARVMTNKKMVTPYANGWKLSPVVGAVYGPELYAASSFQADVSLGNDAAVPLSGRGGINTYIPLIIPGFPYPTAATTAAAFRGAHLRGRGRTVYGAVRAVPPTAIPAYPGVDMQPTDMHSLLLQPQPPLLQPLQPLTVTVMAGCTQPTPTMPLPLPLAMELALWRVYTEVATADLPPTEVT

SEQ ID NO: 4922 - protein, 380 aa, Homo sapiens
MEKKKMVTQGNQEPTTTPDAMVQPFTTIPFPPPPQNGIPTEYGVPHTQDYAGQTGEHNLTLYGSTQAHGEQSSNSPSTQNGSLTTEGGAQTDGQQSQTQSSENSESKSTPKRLHVSNIPFRFRDPDLRQMFGQFGKILDVEIIFNERGSKGFGFVTFENSADADRAREKLHGTVVEGRKIEVNNATARVMTNKKMVTPYANGWKLSPVVGAVYGPELYAASSFQADVSLGNDAAVPLSGRGGINTYIPLISLPLVPGFPYPTAATTAAAFRGAHLRGRGRTVYGAVRAVPPTAIPAYPGVVYQDGFYGADLYGGYAAYRYAQPATATAATAAAAAAAAYSDGYGRVYTADPYHALAPAASYGVGAVASLYRGGYSRFAPY

SEQ ID NO: 4923 - protein, 370 aa, Homo sapiens
MEKKKMVTQGNQEPTTTPDAMVQPFTTIPFPPPPQNGIPTEYGVPHTQDYAGQTGEHNLTLYGSTQAHGEQSSNSPSTQNGSLTTEGGAQTDGQQSQTQSSENSESKSTPKRLHVSNIPFRFRDPDLRQMFGQFGKILDVEIIFNERGSKGFGFVTFENSADADRAREKLHGTVVEGRKIEVNNATARVMTNKKMVTPYANGWKLSPVVGAVYGPELYAASSFQADVSLGNDAAVPLSGRGGINTYIPLISLPLVPGFPYPTAATTAAAFRGAHLRGRGRTVYGAVRAVPPTAIPAYPGVDMQPTDMHSLLLQPQPPLLQPLQPLTVTVMAGCTQPTPTMPLPLPLAMELALWRVYTEVATADLPPTEVT

SEQ ID NO: 4924 - protein, 376 aa, Homo sapiens
MEKKKMVTQGNQEPTTTPDAMVQPFTTIPFPPPPQNGIPTEYGVPHTQDYAGQTGEHNLTLYGSTQAHGEQSSNSPSTQNGSLTTEGGAQTDGQQSQTQSSENSESKSTPKRLHVSNIPFRFRDPDLRQMFGQFGKILDVEIIFNERGSKGFGFVTFENSADADRAREKLHGTVVEGRKIEVNNATARVMTNKKMVTPYANGWKLSPVVGAVYGPELYAASSFQADVSLGNDAAVPLSGRGGINTYIPLIIPGFPYPTAATTAAAFRGAHLRGRGRTVYGAVRAVPPTAIPAYPGVVYQDGFYGADLYGGYAAYRYAQPATATAATAAAAAAAAYSDGYGRVYTADPYHALAPAASYGVGAVASLYRGGYSRFAPY

SEQ ID NO: 4925 - protein, 312 aa, Homo sapiens
MAQPYPPAQYPPPPQNGIPAEYAPPPPHPTQDYSGQTPVPTEHGMTLYTPAQTHPEQPGSEASTQPIAGTQTVPQTDEAAQTDSQPLHPSDPTEKQQPKRLHVSNIPFRFRDPDLRQMFGQFGKILDVEIIFNERGSKGFGFVTFETSSDADRAREKLNGTIVEGRKIEVNNATARVMTNKKTGNPYTNGWKLNPVVGAVYGPEFYAVTGFPYPTTGTAVAYRGAHLRGRGRAVYNTFRAAPPPPPIPTYGAVVYQDGFYGAEIYGGYAAYRYAQPAAAAAAYSDSYGRVYAAADPYHHTIGPAATYSIGTM

SEQ ID NO: 4926 - protein, 312 aa, Homo sapiens; identical to SEQ ID NO: 4925

SEQ ID NO: 4927 - protein, 995 aa, Homo sapiens
MSSLPRRAKVQVQDVVLKDEFSSFSELSSASEEDDKEDSAWEPQKKVPRSRKQPPPKESKPKRMPRVKKNAPQISDGSEVVVVKEELNSSVAIADTALEDRKNKLDTVQTLKTAKTKQKCAAQPHTVRRTKKLKVEEETSKASNLEGESNSSETPSTSTVWGGTCKKEENDDDFTFGQSALKKIKTETYPQGQPVKFPANANSTKEEVEMNWDMVQVLSERTNIEPWVCANIIRLFNDDNTIPFIIRYRKELINNLDADSLREVQQTLEELRAVAKKVHSTIQKIKKEGKMSECLLKAMLNCKTFEELEHVSAPYKTGSKGTKAQRARQLGLEGAARALLEKPGELSLLSYIRPDVKGLSTLQDIEIGVQHILADMIAKDKDTLDFIRNLCQKRHVCIQSSLAKVSSKKVNEKDVDKFLLYQHFSCNIRNIHHHQILAINRGENLKVLTVKVNISDGVKDEFCRWCIQNRWRPRSFARPELMKILYNSLNDSFKRLIYPLLCREFRAKLTSDAEKESVMMFGRNLRQLLLTSPVPGRTLMGVDPGYKHGCKLAIISPTSQILHTDVVYLHCGQGFREAEKIKTLLLNFNCSTVVIGNGTACRETEAYFADLIMKNYFAPLDVVYCIVSEAGASIYSVSPEANKEMPGLDPNLRSAVSIARRVQDPLAELVKIEPKHIGVGMYQHDVSQTLLKATLDSVVEECVSFVGVDINICSEVLLRHIAGLNANRAKNIIEWREKNGPFINREQLKKVKGLGPKSFQQCAGFIRINQDYIRTFCSQQTETSGQIQGVAVTSSADVEVTNEKQGKKKSKTAVNVLLKPNPLDQTCIHPESYDIAMRFLSSIGGTLYEVGKPEMQQKINSFLEKEGMEKIAERLQTTVHTLQVIIDGLSQPESFDFRTDFDKPDFKRSIVCLEDLQIGTVLTGKVENATLFGIFVDIGVGKSGLIPIRNVTEAKLSKTKKRRSLGLGPGERVEVQVLNIDIPRSRITLDLIRVL

SEQ ID NO: 4928 - protein, 514 aa, Homo sapiens
MKILYNSLNDSFKRLIYPLLCREFRAKLTSDAEKESVMMFGRNLRQLLLTSPVPGRTLMGVDPGYKHGCKLAIISPTSQILHTDVVYLHCGQGFREAEKIKTLLLNFNCSTVVIGNGTACRETEAYFADLIMKNYFAPLDVVYCIVSEAGASIYSVSPEANKEMPGLDPNLRSAVSIARRVQDPLAELVKIEPKHIGVGMYQHDVSQTLLKATLDSVVEECVSFVGVDINICSEVLLRHIAGLNANRAKNIIEWREKNGPFINREQLKKVKGLGPKSFQQCAGFIRINQDYIRTFCSQQTETSGQIQGVAVTSSADVEVTNEKQGKKKSKTAVNVLLKPNPLDQTCIHPESYDIAMRFLSSIGGTLYEVGKPEMQQKINSFLEKEGMEKIAERLQTTVHTLQVIIDGLSQPESFDFRTDFDKPDFKRSIVCLEDLQIGTVLTGKVENATLFGIFVDIGVGKSGLIPIRNVTEAKLSKTKKRRSLGLGPGERVEVQVLNIDIPRSRITLDLIRVL

SEQ ID NO: 4929 - protein, 408 aa, Homo sapiens
MPGHLQEGFGCVVTNRFDQLFDDESDPFEVLKAAENKKKEAGGGGVGGPGAKSAAQAAAQTNSNAAGKQLRKESQKDRKNPLPPSVGVVDKKEETQPPVALKKEGIRRVGRRPDQQLQGEGKIIDRRPERRPPRERRFEKPLEEKGEGGEFSVDRPIIDRPIRGRGGLGRGRGGRGRGMGRGDGFDSRGKREFDRHSGSDRSSFSHYSGLKHEDKRGGSGSHNWGTVKDELTESPKYIQKQISYNYSDLDQSNVTEETPEGEEHHPVADTENKENEVEEVKEEGPKEMTLDEWKAIQNKDRAKVEFNIRKPNEGADGQWKKGFVLHKSKSEEAHAEDSVMDHHFRKPANDITSQLEINFGDLGRPGRGGRGGRGGRGRGGRPNRGSRTDKSSASAPDVDDPEAFPALA

SEQ ID NO: 4930 - protein, 393 aa, Homo sapiens
MPGHLQEGFGCVVTNRFDQLFDDESDPFEVLKAAENKKKEAGGGGVGGPGAKSAAQAAAQTNSNAAGKQLRKESQKDRKNPLPPSVGVVDKKEETQPPVALKKEGIRRVGRRPDQQLQGEGKIIDRRPERRPPRERRFEKPLEEKGEGGEFSVDRPIIDRPIRGRGGLGRGRGGRGRGMGRGDGFDSRGKREFDRHSGSDRSSFSHYSGLKHEDKRGGSGSHNWGTVKDELTDLDQSNVTEETPEGEEHHPVADTENKENEVEEVKEEGPKEMTLDEWKAIQNKDRAKVEFNIRKPNEGADGQWKKGFVLHKSKSEEAHAEDSVMDHHFRKPANDITSQLEINFGDLGRPGRGGRGGRGGRGRGGRPNRGSRTDKSSASAPDVDDPEAFPALA

SEQ ID NO: 4931 - protein, 387 aa, Homo sapiens
MPGHLQEGFGCVVTNRFDQLFDDESDPFEVLKAAENKKKEAGGGGVGGPGAKSAAQAAAQTNSNAAGKQLRKESQKDRKNPLPPSVGVVDKKEETQPPVALKKEGIRRVGRRPDQQLQGEGKIIDRRPERRPPRERRFEKPLEEKGEGGEFSVDRPIIDRPIRGRGGLGRGRGGRGRGMGRGDGFDSRGKREFDRHSGSDRSGLKHEDKRGGSGSHNWGTVKDELTDLDQSNVTEETPEGEEHHPVADTENKENEVEEVKEEGPKEMTLDEWKAIQNKDRAKVEFNIRKPNEGADGQWKKGFVLHKSKSEEAHAEDSVMDHHFRKPANDITSQLEINFGDLGRPGRGGRGGRGGRGRGGRPNRGSRTDKSSASAPDVDDPEAFPALA

SEQ ID NO: 4932 - protein, 402 aa, Homo sapiens
MPGHLQEGFGCVVTNRFDQLFDDESDPFEVLKAAENKKKEAGGGGVGGPGAKSAAQAAAQTNSNAAGKQLRKESQKDRKNPLPPSVGVVDKKEETQPPVALKKEGIRRVGRRPDQQLQGEGKIIDRRPERRPPRERRFEKPLEEKGEGGEFSVDRPIIDRPIRGRGGLGRGRGGRGRGMGRGDGFDSRGKREFDRHSGSDRSGLKHEDKRGGSGSHNWGTVKDELTESPKYIQKQISYNYSDLDQSNVTEETPEGEEHHPVADTENKENEVEEVKEEGPKEMTLDEWKAIQNKDRAKVEFNIRKPNEGADGQWKKGFVLHKSKSEEAHAEDSVMDHHFRKPANDITSQLEINFGDLGRPGRGGRGGRGGRGRGGRPNRGSRTDKSSASAPDVDDPEAFPALA

SEQ ID NO: 4933 - protein, 136 aa, Homo sapiens
MVLLESEQFLTELTRLFQKCRTSGSVYITLKKYDGRTKPIPKKGTVEGFEPADNKCLLRATDGKKKISTVVSSKEVNKFQMAYSNLLRANMDGLKKRDKKNKTKKTKAAAAAAAAAPAAAATAPTTAATTAATAAQ

SEQ ID NO: 4934 - protein, 94 aa, Homo sapiens
MRSIRSFANDDRHVMVKHSTIYPSPEELEAVQNMVSTVECALKHVSDWLDETNKGTKTEGETEVKKDEAGENYSKWSDIVWCNEDWPGCKRLAD

SEQ ID NO: 4935 - protein, 672 aa, Homo sapiens
MRSIRSFANDDRHVMVKHSTIYPSPEELEAVQNMVSTVECALKHVSDWLDETNKGTKTEGETEVKKDEAGENYSKDQGGRTLCGVMRIGLVAKGLLIKDDMDLELVLMCKDKPTETLLNTVKDNLPIQIQKLTEEKYQVEQCVNEASIIIRNTKEPTLTLKVILTSPLIRDELEKKDGENVSMKDPPDLLDRQKCLNALASLRHAKWFQARANGLKSCVIVLRILRDLCNRVPTWAPLKGWPLELICEKSIGTCNRPLGAGEALRRVMECLASGILLPGGPGLHDPCERDPTDALSYMTIQQKEDITHSAQHALRLSAFGQIYKVLEMDPLPSSKPFQKYSWSVTDKEGAGSSALKRPFEDGLGDDKDPNKKMKRNLRKILDSKAIDLMNALMRLNQIRPGLQYKLLSQSGPVHAPVFTMSVDVDGTTYEASGPSKKTAKLHVAVKVLQAMGYPTGFDADIECMSSDEKSDNESKNETVSSNSSNNTGNSTTETSSTLEVRTQGPILTASGKNPVMELNEKRRGLKYELISETGGSHDKRFVMEVEVDGQKFRGAGPNKKVAKASAALAALEKLFSGPNAANNKKKKIIPQAKGVVNTAVSAAVQAVRGRGRGTLTRGAFVGATAAPGYIAPGYGTPYGYSTAAPAYGLPKRMVLLPVMKFPTYPVPHYSFF

SEQ ID NO: 4936 - protein, 74 aa, Homo sapiens
MRSIRSFANDDRHVMVKHSTIYPSPEELEAVQNMVSTVECALKHVSDWLDETNKGTKTEGETEVKKDEAGENYS

SEQ ID NO: 4937 - protein, 672 aa, Homo sapiens; identical to SEQ ID NO: 4935

SEQ ID NO: 4938 - protein, 658 aa, Homo sapiens
MVKHSTIYPSPEELEAVQNMVSTVECALKHVSDWLDETNKGTKTEGETEVKKDEAGENYSKDQGGRTLCGVMRIGLVAKGLLIKDDMDLELVLMCKDKPTETLLNTVKDNLPIQIQKLTEEKYQVEQCVNEASIIIRNTKEPTLTLKVILTSPLIRDELEKKDGENVSMKDPPDLLDRQKCLNALASLRHAKWFQARANGLKSCVIVLRILRDLCNRVPTWAPLKGWPLELICEKSIGTCNRPLGAGEALRRVMECLASGILLPGGPGLHDPCERDPTDALSYMTIQQKEDITHSAQHALRLSAFGQIYKVLEMDPLPSSKPFQKYSWSVTDKEGAGSSALKRPFEDGLGDDKDPNKKMKRNLRKILDSKAIDLMNALMRLNQIRPGLQYKLLSQSGPVHAPVFTMSVDVDGTTYEASGPSKKTAKLHVAVKVLQAMGYPTGFDADIECMSSDEKSDNESKNETVSSNSSNNTGNSTTETSSTLEVRTQGPILTASGKNPVMELNEKRRGLKYELISETGGSHDKRFVMEVEVDGQKFRGAGPNKKVAKASAALAALEKLFSGPNAANNKKKKIIPQAKGVVNTAVSAAVQAVRGRGRGTLTRGAFVGATAAPGYIAPGYGTPYGYSTAAPAYGLPKRMVLLPVMKFPTYPVPHYSFF

SEQ ID NO: 4939 - protein, 109 aa, Homo sapiens
MAASAARGAAALRRSINQPVAFVRRIPWTAASSQLKEHFAQFGHVRRCILPFDKETGFHRGLGWVQFSSEEGLRNALQQENHIIDGVKVQVHTRRPKLPQTSDDEKKDF

SEQ ID NO: 4940 - protein, 577 aa, Homo sapiens
MSQVQVQVQNPSAALSGSQILNKNQSLLSQPLMSIPSTTSSLPSENAGRPIQNSALPSASITSTSAAAESITPTVELNALCMKLGKKPMYKPVDPYSRMQSTYNYNMRGGAYPPRYFYPFPVPPLLYQVELSVGGQQFNGKGKTRQAAKHDAAAKALRILQNEPLPERLEVNGRESEEENLNKSEISQVFEIALKRNLPVNFEVARESGPPHMKNFVTKVSVGEFVGEGEGKSKKISKKNAAIAVLEELKKLPPLPAVERVKPRIKKKTKPIVKPQTSPEYGQGINPISRLAQIQQAKKEKEPEYTLLTERGLPRRREFVMQVKVGNHTAEGTGTNKKVAKRNAAENMLEILGFKVPQAQPTKPALKSEEKTPIKKPGDGRKVTFFEPGSGDENGTSNKEDEFRMPYLSHQQLPAGILPMVPEVAQAVGVSQGHHTKDFTRAAPNPAKATVTAMIARELLYGGTSPTAETILKNNISSGHVPHGPLTRPSEQLDYLSRVQGFQVEYKDFPKNNKNEFVSLINCSSQPPLISHGIGKDVESCHDMAALNILKLLSELDQQSTEMPRTGNGPMSVCGRC

SEQ ID NO: 4941 - protein, 496 aa, Homo sapiens
MKLGKKPMYKPVDPYSRMQSTYNYNMRGGAYPPRYFYPFPVPPLLYQVELSVGGQQFNGKGKTRQAAKHDAAAKALRILQNEPLPERLEVNGRESEEENLNKSEISQVFEIALKRNLPVNFEVARESGPPHMKNFVTKVSVGEFVGEGEGKSKKISKKNAAIAVLEELKKLPPLPAVERVKPRIKKKTKPIVKPQTSPEYGQGINPISRLAQIQQAKKEKEPEYTLLTERGLPRRREFVMQVKVGNHTAEGTGTNKKVAKRNAAENMLEILGFKVPQAQPTKPALKSEEKTPIKKPGDGRKVTFFEPGSGDENGTSNKEDEFRMPYLSHQQLPAGILPMVPEVAQAVGVSQGHHTKDFTRAAPNPAKATVTAMIARELLYGGTSPTAETILKNNISSGHVPHGPLTRPSEQLDYLSRVQGFQVEYKDFPKNNKNEFVSLINCSSQPPLISHGIGKDVESCHDMAALNILKLLSELDQQSTEMPRTGNGPMSVCGRC

SEQ ID NO: 4942 - protein, 502 aa, Homo sapiens
MKLGKKPMYKPVDPYSRMQSTYNYNMRGGAYPPRYFYPFPVPPLLYQVELSVGGQQFNGKGKTRQAAKHDAAAKALRILQNEPLPERLEVNGRESEEENLNKSEISQVFEIALKRNLPVNFESFPLKQVARESGPPHMKNFVTKVSVGEFVGEGEGKSKKISKKNAAIAVLEELKKLPPLPAVERVKPRIKKKTKPIVKPQTSPEYGQGINPISRLAQIQQAKKEKEPEYTLLTERGLPRRREFVMQVKVGNHTAEGTGTNKKVAKRNAAENMLEILGFKVPQAQPTKPALKSEEKTPIKKPGDGRKVTFFEPGSGDENGTSNKEDEFRMPYLSHQQLPAGILPMVPEVAQAVGVSQGHHTKDFTRAAPNPAKATVTAMIARELLYGGTSPTAETILKNNISSGHVPHGPLTRPSEQLDYLSRVQGFQVEYKDFPKNNKNEFVSLINCSSQPPLISHGIGKDVESCHDMAALNILKLLSELDQQSTEMPRTGNGPMSVCGRC

SEQ ID NO: 4943 - protein, 496 aa, Homo sapiens; identical to SEQ ID NO: 4941

SEQ ID NO: 4944 - protein, 502 aa, Homo sapiens; identical to SEQ ID NO: 4942

SEQ ID NO: 4945 - protein, 129 aa, Homo sapiens
MCEVSRGWKPCTEGILKVRPTRKISYEGNITPTVELNALCMKLGKKPMYKPVDPYSRMQSTYNYNMRGGAYPPRYFYPFPVPPLLYQVELSVGGQQFNGKGKTRQAAKHDAAAKALRILQNEPLPERLE

SEQ ID NO: 4946 - protein, 496 aa, Homo sapiens; identical to SEQ ID NO: 4941

SEQ ID NO: 4947 - protein, 496 aa, Homo sapiens; identical to SEQ ID NO: 4941

SEQ ID NO: 4948 - protein, 494 aa, Homo sapiens
MKLGKKPMYKPVDPYSRMQSTYNYNMRGGAYPPRYFYPFPVPPLLYQVELSVGGQQFNGKGKTRQAAKHDAAAKALRILQNEPLPERLEVNGRESEEENLNKSEISQVFEIALKRNLPVNFEVARESGPPHMKNFVTKVSVGEFVGEGEGKSKKISKKNAAIAVLEELKKLPPLPAVERVKPRIKKKTKPIVKTSPEYGQGINPISRLAQIQQAKKEKEPEYTLLTERGLPRRREFVMQVKVGNHTAEGTGTNKKVAKRNAAENMLEILGFKVPQAQPTKPALKSEEKTPIKKPGDGRKVTFFEPGSGDENGTSNKEDEFRMPYLSHQQLPAGILPMVPEVAQAVGVSQGHHTKDFTRAAPNPAKATVTAMIARELLYGGTSPTAETILKNNISSGHVPHGPLTRPSEQLDYLSRVQGFQVEYKDFPKNNKNEFVSLINCSSQPPLISHGIGKDVESCHDMAALNILKLLSELDQQSTEMPRTGNGPMSVCGRC

SEQ ID NO: 4949 - protein, 199 aa, Homo sapiens
MKLGKKPMYKPVDPYSRMQSTYNYNMRGGAYPPRYFYPFPVPPLLYQVELSVGGQQFNGKGKTRQAAKHDAAAKALRILQNEPLPERLEVNGRESEEENLNKSEISQVFEIALKRNLPVNFESFPLKQVARESGPPHMKNFVTKVSVGEFVGEGEGKSKKISKKNAAIAVLEELKKLPPLPAVERVKPRIKKKTKPIVK

SEQ ID NO: 4950 - protein, 479 aa, Homo sapiens
MLQINQMFSVQLSLGEQTWESEGSSIKKAQQAVANKALTESTLPKPVQKPPKSNVNNNPGSITPTVELNGLAMKRGEPAIYRPLDPKPFPNYRANYNFRGMYNQRYHCPVPKIFYVQLTVGNNEFFGEGKTRQAARHNAAMKALQALQNEPIPERSPQNGESGKDVDDDKDANKSEISLVFEIALKRNMPVSFEVIKESGPPHMKSFVTRVSVGEFSAEGEGNSKKLSKKRAATTVLQELKKLPPLPVVEKPKLFFKKRPKTIVKAGPEYGQGMNPISRLAQIQQAKKEKEPDYVLLSERGMPRRREFVMQVKVGNEVATGTGPNKKIAKKNAAEAMLLQLGYKASTNLQDQLEKTGENKGWSGPKPGFPEPTNNTPKGILHLSPDVYQEMEASRHKVISGTTLGYLSPKDMNQPSSSFFSISPTSNSSATIARELLMNGTSSTAEAIGLKGSSPTPPCSPVQPSKQLEYLARIQGFQV

SEQ ID NO: 4951 - protein, 570 aa, Homo sapiens
MANPKEKTAMCLVNELARFNRVQPQYKLLNERGPAHSKMFSVQLSLGEQTWESEGSSIKKAQQAVANKALTESTLPKPVQKPPKSNVNNNPGSITPTVELNGLAMKRGEPAIYRPLDPKPFPNYRANYNFRGMYNQRYHCPVPKIFYVQLTVGNNEFFGEGKTRQAARHNAAMKALQALQNEPIPERSPQNGESGKDVDDDKDANKSEISLVFEIALKRNMPVSFEVIKESGPPHMKSFVTRVSVGEFSAEGEGNSKKLSKKRAATTVLQELKKLPPLPVVEKPKLFFKKRPKTIVKAGPEYGQGMNPISRLAQIQQAKKEKEPDYVLLSERGMPRRREFVMQVKVGNEVATGTGPNKKIAKKNAAEAMLLQLGYKASTNLQDQLEKTGENKGWSGPKPGFPEPTNNTPKGILHLSPDVYQEMEASRHKVISGTTLGYLSPKDMNQPSSSFFSISPTSNSSATIARELLMNGTSSTAEAIGLKGSSPTPPCSPVQPSKQLEYLARIQGFQAALSALKQFSEQGLDPIDGAMNIEKGSLEKQAKHLREKADNNQAPPGSIAQDCKKSNSAV

SEQ ID NO: 4952 - protein, 105 aa, Homo sapiens
MLQINQMFSVQLSLGEQTWESEGSSIKKAQQAVANKALTESTLPKPVQKPPKSNVNNNPGSITPTVELNGLAMKRGEPAIYRPLDPKPFPNYRANYNFRGMYNQR

SEQ ID NO: 4953 - protein, 538 aa, Homo sapiens
MLQINQMFSVQLSLGEQTWESEGSSIKKAQQAVANKALTESTLPKPVQKPPKSNVNNNPGSITPTVELNGLAMKRGEPAIYRPLDPKPFPNYRANYNFRGMYNQRYHCPVPKIFYVQLTVGNNEFFGEGKTRQAARHNAAMKALQALQNEPIPERSPQNGESGKDVDDDKDANKSEISLVFEIALKRNMPVSFEVIKESGPPHMKSFVTRVSVGEFSAEGEGNSKKLSKKRAATTVLQELKKLPPLPVVEKPKLFFKKRPKTIVKAGPEYGQGMNPISRLAQIQQAKKEKEPDYVLLSERGMPRRREFVMQVKVGNEVATGTGPNKKIAKKNAAEAMLLQLGYKASTNLQDQLEKTGENKGWSGPKPGFPEPTNNTPKGILHLSPDVYQEMEASRHKVISGTTLGYLSPKDMNQPSSSFFSISPTSNSSATIARELLMNGTSSTAEAIGLKGSSPTPPCSPVQPSKQLEYLARIQGFQAALSALKQFSEQGLDPIDGAMNIEKGSLEKQAKHLREKADNNQAPPGSIAQDCKKSNSAV

SEQ ID NO: 4954 - protein, 479 aa, Homo sapiens; identical to SEQ ID NO: 4950

SEQ ID NO: 4955 - protein, 64 aa, Homo sapiens
MLQINQMFSVQLSLGEQTWESEGSSIKKAQQAVANKALTESTLPKPVQKPPKSNVNNNPGSITP

SEQ ID NO: 4956 - protein, 204 aa, Homo sapiens
MLQINQMFSVQLSLGEQTWESEGSSIKKAQQAVANKALTESTLPKPVQKPPKSNVNNNPGSITPTVELNGLAMKRGEPAIYRPLDPKPFPNYRANYNFRGMYNQRYHCPVPKIFYVQLTVGNNEFFGEGKTRQAARHNAAMKALQALQNEPIPERSPQNGESGKDVDDDKDANKSEISLVFEIALKRNMPVSFEVIKESGPPHM

SEQ ID NO: 4957 - protein, 1621 aa, Homo sapiens
MEWVLAEALLSQSRDPRALLGALCQGEASAERVETLRFLLQRLEDEEARGSGGAGALPEAAREVAAGYLVPLLRSLRGRPAGGPDPSLQPRHRRRVLRAAGAALRSCVRLAGRPQLAAALAEEALRDLLAGWRAPGAEAAVEVLAAVGPCLRPREDGPLLERVAGTAVALALGGGGDGDEAGPAEDAAALVAGRLLPVLVQCGGAALRAVWGGLAAPGASLGSGRVEEKLLVLSALAEKLLPEPGGDRARGAREAGPDARRCWRFWRTVQAGLGQADALTRKRARYLLQRAVEVSAELGADCTCGPQEGNGPSLFWWSERKKDELLKFWENYILIMETLEGNQIHVIKPVLPKLNNLFEYAVSEENGCWLFHPSWHMCIYKRMFESENKILSKEGVIHFLELYETKILPFSPEFSEFIIGPLMDALSESSLYSRSPGQPIGSCSPLGLKLQKFLVTYISLLPEEIKSSFLLKFIRKMTSRHWCAVPILFLSKALANVPRHKALGIDGLLALRDVIHCTMITHQILLRGAAQCYLLQTAMNLLDVEKVSLSDVSTFLMSLRQEESLGRGTSLWTELCDWLRVNESYFKPSPTCSSIGLHKTSLNAYVKSIVQEYVKSSAWETGENCFMPDWFEAKLVSLMVLLAVDVEGMKTQYSGKQRTENVLRIFLDPLLDVLMKFSTNAYMPLLKTDRCLQLLLKLLNTCRLKGSSAQDDEVSTVLQNFFMSTTESISEFILRRLTMNELNSVSDLDRCHLYLMVLTELINLHLKVGWKRGNPIWRVISLLKNASIQHLQEMDSGQEPTVGSQIQRVVSMAALAMVCEAIDQKPELQLDSLHAGPLESFLSSLQLNQTLQKPHAEEQSSYAHPLECSSVLEESSSSQGWGKIVAQYIHDQWVCLSFLLKKYHTLIPTTGSEILEPFLPAVQMPIRTLQSALEALTVLSSDQVLPVFHCLKVLVPKLLTSSESLCIESFDMAWKIISSLSNTQLIFWANLKAFVQFVFDNKVLTIAAKIKGQAYFKIKEIMYKIIEMSAIKTGVFNTLISYCCQSWIVSASNVSQGSLSSAKNYSELILEACIFGTVFRRDQRLVQDVQTFIENLGHDCAANIVMENTKREDHYVRICAVKFLCLLDGSNMSHKLFIEDLAIKLLDKDELVSKSKKRYYVNSLQHRVKNRVWQTLLVLFPRLDQNFLNGIIDRIFQAGFTNNQASIKYFIEWIIILILHKFPQFLPKFWDCFSYGEENLKTSICTFLAVLSHLDIITQNIPEKKLILKQALIVVLQWCFNHNFSVRLYALVALKKLWTVCKVLSVEEFDALTPVIESSLHQVESMHGAGNAKKNWQRIQEHFFFATFHPLKDYCLETIFYILPRLSGLIEDEWITIDKFTRFTDVPLAAGFQWYLSQTQLSKLKPGDWSQQDIGTNLVEADNQAEWTDVQKKIIPWNSRVSDLDLELLFQDRAARLGKSISRLIVVASLIDKPTNLGGLCRTCEVFGASVLVVGSLQCISDKQFQHLSVSAEQWLPLVEVKPPQLIDYLQQKKTEGYTIIGVEQTAKSLDLTQYCFPEKSLLLLGNEREGIPANLIQQLDVCVEIPQQGIIRSLNVHVSGALLIWEYTRQQLLSHGDTKP

SEQ ID NO: 4958 - protein, 345 aa, Homo sapiens
MLAANPGKTPISLLQEYGTRIGKTPVYDLLKAEGQAHQPNFTFRVTVGDTSCTGQGPSKKAAKHKAAEVALKHLKGGSMLEPALEDSSSFSPLDSSLPEDIPVFTAAAAATPVPSVVLTRSPPMELQPPVSPQQSECNPVGALQELVVQKGWRLPEYTVTQESGPAHRKEFTMTCRVERFIEIGSGTSKKLAKRNAAAKMLLRVHTVPLDARDGNEVEPDDDHFSIGVGSRLDGLRNRGPGCTWDSLRNSVGEKILSLRSCSLGSLGALGPACCRVLSELSEEQAFHVSYLDIEELSLSGLCQCLVELSTQPATVCHGSATTREAARGEAARRALQYLKIMAGSK

SEQ ID NO: 4959 - protein, 366 aa, Homo sapiens
MSEEEQGSGTTTGCGLPSIEQMLAANPGKTPISLLQEYGTRIGKTPVYDLLKAEGQAHQPNFTFRVTVGDTSCTGQGPSKKAAKHKAAEVALKHLKGGSMLEPALEDSSSFSPLDSSLPEDIPVFTAAAAATPVPSVVLTRSPPMELQPPVSPQQSECNPVGALQELVVQKGWRLPEYTVTQESGPAHRKEFTMTCRVERFIEIGSGTSKKLAKRNAAAKMLLRVHTVPLDARDGNEVEPDDDHFSIGVGSRLDGLRNRGPGCTWDSLRNSVGEKILSLRSCSLGSLGALGPACCRVLSELSEEQAFHVSYLDIEELSLSGLCQCLVELSTQPATVCHGSATTREAARGEAARRALQYLKIMAGSK

SEQ ID NO: 4960 - protein, 386 aa, Homo sapiens
MEDEMPKTLYVGNLSRDVTEALILQLFSQIGPCKNCKMIMDTAGNDPYCFVEFHEHRHAAAALAAMNGRKIMGKEVKVNWATTPSSQKKDTSSSTVVSTQRSQDHFHVFVGDLSPEITTEDIKAAFAPFGRISDARVVKDMATGKSKGYGFVSFFNKWDAENAIQQMGGQWLGGRQIRTNWATRKPPAPKSTYESNTKQLSYDEVVNQSSPSNCTVYCGGVTSGLTEQLMRQTFSPFGQIMEIRVFPDKGYSFVRFNSHESAAHAIVSVNGTTIEGHVVKCYWGKETLDMINPVQQQNQIGYPQPYGQWGQWYGNAQQIGQYMPNGWQVPAYGMYGQAWNQQGFNQTQSSAPWMGPNYGVQPPQGQNGSMLPNQPSGYRVAGYETQ

SEQ ID NO: 4961 - protein, 463 aa, Homo sapiens
PLVSRETPLSCSHNRLNDLGGSEGQGAGPGGAAATAAAMEDEMPKTLYVGNLSRDVTEALILQLFSQIGPCKNCKMIMDTAGNDPYCFVEFHEHRHAAAALAAMNGRKIMGKEVKVNWATTPSSQKKDTSSSTVVSTQRSQDHFHVFVGDLSPEITTEDIKAAFAPFGRISDARVVKDMATGKSKGYGFVSFFNKWDAENAIQQMGGQWLGGRQIRTNWATRKPPAPKSTYECRCIGEEKEMWNFGEKYARFCSRRLIAEIDEKQIKTTIQKSNTKQLSYDEVVNQSSPSNCTVYCGGVTSGLTEQLMRQTFSPFGQIMEIRVFPDKGYSFVRFNSHESAAHAIVSVNGTTIEGHVVKCYWGKETLDMINPVQQNQIGYPQPYGQWGQWYGNAQQIGQYMPNGWQVPAYGMYGQAWNQQGFNQTQSSAPWMGPNYGVQPPQGQNGSMLPNQPSGYRVAGYETQ

SEQ ID NO: 4962 - protein, 375 aa, Homo sapiens
MEDEMPKTLYVGNLSRDVTEALILQLFSQIGPCKNCKMIMDTAGNDPYCFVEFHEHRHAAAALAAMNGRKIMGKEVKVNWATTPSSQKKDTSNHFHVFVGDLSPEITTEDIKAAFAPFGRISDARVVKDMATGKSKGYGFVSFFNKWDAENAIQQMGGQWLGGRQIRTNWATRKPPAPKSTYESNTKQLSYDEVVNQSSPSNCTVYCGGVTSGLTEQLMRQTFSPFGQIMEIRVFPDKGYSFVRFNSHESAAHAIVSVNGTTIEGHVVKCYWGKETLDMINPVQQQNQIGYPQPYGQWGQWYGNAQQIGQYMPNGWQVPAYGMYGQAWNQQGFNQTQSSAPWMGPNYGVQPPQGQNGSMLPNQPSGYRVAGYETQ

SEQ ID NO: 4963 - protein, 132 aa, Homo sapiens
MITEHTSNDPYCFVEFYEHRDAAAALAAMNGRKILGKEVKVNWATTPSSQKKDTSNHFHVFVGDLSPEITTEDIKSAFAPFGKISDARVVKDMATGKSKGYGFVSFYNKLDAENAIVHMGGQWLGGRQIRTN

SEQ ID NO: 4964 - protein, 375 aa, Homo sapiens
MMEDDGQPRTLYVGNLSRDVTEVLILQLFSQIGPCKSCKMITEHTSNDPYCFVEFYEHRDAAAALAAMNGRKILGKEVKVNWATTPSSQKKDTSNHFHVFVGDLSPEITTEDIKSAFAPFGKISDARVVKDMATGKSKGYGFVSFYNKLDAENAIVHMGGQWLGGRQIRTNWATRKPPAPKSTQENNTKQLRFEDVVNQSSPKNCTVYCGGIASGLTDQLMRQTFSPFGQIMEIRVFPEKGYSFVRFSTHESAAHAIVSVNGTTIEGHVVKCYWGKESPDMTKNFQQVDYSQWGQWSQVYGNPQQYGQYMANGWQVPPYGVYGQPWNQQGFGVDQSPSAAWMGGFGAQPPQGQAPPPVIPPPNQAGYGMASYQTQ

SEQ ID NO: 4965 - protein, 85 aa, Homo sapiens
MITEHTSNDPYCFVEFYEHRDAAAALAAMNGRKILGKEVKVNWATTPSSQKKDTSNHFHVFVGDLSPEITTEDIKSAFAPFGKIS

SEQ ID NO: 4966 - protein, 392 aa, Homo sapiens
MMEDDGQPRTLYVGNLSRDVTEVLILQLFSQIGPCKSCKMITEQPDSRRVNSSVGFSVLQHTSNDPYCFVEFYEHRDAAAALAAMNGRKILGKEVKVNWATTPSSQKKDTSNHFHVFVGDLSPEITTEDIKSAFAPFGKISDARVVKDMATGKSKGYGFVSFYNKLDAENAIVHMGGQWLGGRQIRTNWATRKPPAPKSTQENNTKQLRFEDVVNQSSPKNCTVYCGGIASGLTDQLMRQTFSPFGQIMEIRVFPEKGYSFVRFSTHESAAHAIVSVNGTTIEGHVVKCYWGKESPDMTKNFQQVDYSQWGQWSQVYGNPQQYGQYMANGWQVPPYGVYGQPWNQQGFGVDQSPSAAWMGGFGAQPPQGQAPPPVIPPPNQAGYGMASYQTQ

SEQ ID NO: 4967 - protein, 252 aa, Homo sapiens
MDARVVKDMATGKSKGYGFVSFYNKLDAENAIVHMGGQWLGGRQIRTNWATRKPPAPKSTQENNTKQLRFEDVVNQSSPKNCTVYCGGIASGLTDQLMRQTFSPFGQIMEIRVFPEKGYSFVRFSTHESAAHAIVSVNGTTIEGHVVKCYWGKESPDMTKNFQQVDYSQWGQWSQVYGNPQQYGQYMANGWQVPPYGVYGQPWNQQGFGVDQSPSAAWMGGFGAQPPQGQAPPPVIPPPNQAGYGMASYQTQ

SEQ ID NO: 4968 - protein, 217 aa, Homo sapiens
MSGGLAPSKSTVYVSNLPFSLTNNDLYRIFSKYGKVVKVTIMKDKDTRKSKGVAFILFLDKDSAQNCTRAINNKQLFGRVIKASIAIDNGRAAEFIRRRNYFDKSKCYECGESGHLSYACPKNMLGEREPPKKKEKKKKKKAPEPEEEIEEVEESEDEGEDPALDSLSQAIAFQQAKIEEEQKKWKPSSGVPSTSDDSRRPRIKKSTYFSDEEELSD

SEQ ID NO: 4969 - protein, 1074 aa, Homo sapiens
MIPICPVVSFTYVPSRLGEDAKMATGNYFGFTHSGAAAAAAAAQYSQQPASGVAYSHPTTVASYTVHQAPVAAHTVTAAYAPAAATVAVARPAPVAVAAAATAAAYGGYPTAHTATDYGYTQRQQEAPPPPPPATTQNYQDSYSYVRSTAPAVAYDSKQYYQQPTATAAAVAAAAQPQPSVAETYYQTAPKAGYSQGATQYTQAQQTRQVTAIKPATPSPATTTFSIYPVSSTVQPVAAAATVVPSYTQSATYSTTAVTYSGTSYSGYEAAVYSAASSYYQQQQQQQKQAAAAAAAAAATAAWTGTTFTKKAPFQNKQLKPKQPPKPPQIHYCDVCKISCAGPQTYKEHLEGQKHKKKEAALKASQNTSSSNSSTRGTQNQLRCELCDVSCTGADAYAAHIRGAKHQKVVKLHTKLGKPIPSTEPNVVSQATSSTAVSASKPTASPSSIAANNCTVNTSSVATSSMKGLTTTGNSSLNSTSNTKVSAVPTNMAAKKTSTPKINFVGGNKLQSTGNKAEDIKGTECVKSTPVTSAVQIPEVKQDTVSEPVTPASLAALQSDVQPVGHDYVEEVRNDEGKVIRFHCKLCECSFNDPNAKEMHLKGRRHRLQYKKKVNPDLQVEVKPSIRARKIQEEKMRKQMQKEEYWRRREEEERWRMEMRRYEEDMYWRRMEEEQHHWDDRRRMPDGGYPHGPPGPLGLLGVRPGMPPQPQGPAPLRRPDSSDDRYVMTKHATIYPTEEELQAVQKIVSITERALKLVSDSLSEHEKNKNKEGDDKKEGGKDRALKGVLRVGVLAKGLLLRGDRNVNLVLLCSEKPSKTLLSRIAENLPKQLAVISPEKYDIKCAVSEAAIILNSCVEPKMQVTITLTSPIIREENMREGDVTSGMVKDPPDVLDRQKCLDALAALRHAKWFQARANGLQSCVIIIRILRDLCQRVPTWSDFPSWAMELLVEKAISSASSPQSPGDALRRVFECISSGIILKGSPGLLDPCEKDPFDTLATMTDQQREDITSSAQFALRLLAFRQIHKVLGMDPLPQMSQRFNIHNNRKRRRDSDGVDGFEAEGKKDKKDYDNF

SEQ ID NO: 4970 - protein, 189 aa, Homo sapiens
MIPICPVVSFTYVPSRLGEDAKMATGNYFGFTHSGAAAAAAAAQYSQQPASGVAYSHPTTVASYTVHQAPVAAHTVTAAYAPAAATVAVARPAPVAVAAAATAAAYGGYPTAHTATDYGYTQRQQEAPPPPPPATTQNYQDSYSYVRSTAPAVAYDSKQYYQQPAATEAGSSSSCCCCCNSCLDRDHLY

SEQ ID NO: 4971 - protein, 1056 aa, Homo sapiens
MATGNYFGFTHSGAAAAAAAAQYSQQPASGVAYSHPTTVASYTVHQAPVAAHTVTAAYAPAAATVAVARPAPVAVAAAATAAAYGGYPTAHTATDYGYTQRQQEAPPPPPPATTQNYQDSYSYVRSTAPAVAYDSKQYYQQPTATAAAVAAAAQPQPSVAETYYQTAPKAGYSQGATQYTQAQQTRQVTAIKPATPSPATTTFSIYPVSSTVQPVAAAATVVPSYTQSATYSTTAVTYSGTSYSGYEAAVYSAASSYYQQQQQQQKQAAAAAAAAAATAAWTGTTFTKKAPFQNKQLKPKQPPKPPQIHYCDVCKISCAGPQTYKEHLEGQKHKKKEAALKASQNTSSSNSSTRGTQNQLRCELCDVSCTGADAYAAHIRGAKHQKVVKLHTKLGKPIPSTEPNVVSQATSSTAVSASKPTASPSSIAANNCTVNTSSVATSSMKGLTTTGNSSLNSTSNTKVSAVPTNMAAKKTSTPKINFVGGNKLQSTGNKAEDIKGTECVKSTPVTSAVQIPEVKQDTVSEPVTPASLAALQSDVQPVGHDYVEEVRNDEGKVIRFHCKLCECSFNDPNAKEMHLKGRRHRLQYKKKVNPDLQVEVKPSIRARKIQEEKMRKQMQKEEYWRRREEEERWRMEMRRYEEDMYWRRMEEEQHHWDDRRRMPDGGYPHGPPGPLGLLGVRPGMPPQPQGPAPLRRPDSSDDRYVMTKHATIYPTEEELQAVQKIVSITERALKLVSDSLSEHEKNKNKEGDDKKEGGKDRALKGVLRVGVLAKGLLLRGDRNVNLVLLCSEKPSKTLLSRIAENLPKQLAVISPEKYDIKCAVSEAAIILNSCVEPKMQVTITLTSPIIREENMREGDVTSGMVKDPPDVLDRQKCLDALAALRHAKWFQQARANGLQSCVIIIRILRDLCQRVPTWSDFPSWAMELLVEKAISSASSPQSPGDALRRVFECISSGIILKGSPGLLDPCEKDPFDTLATMTDQQREDITSSAQFALRLLAFRQIHKVLGMDPLPQMSQRFNIHNNRKRRRDSDGMDLKLRGKKTKKIMITFKKCL

SEQ ID NO: 4972 - protein, 70 aa, Homo sapiens
MATSQYFDFAQGGGPQYSPEVETTPPALASGLPCALPWTVGCSGSDAVTALCPSLRGLACICSILWDPAW

SEQ ID NO: 4973 - protein, 939 aa, Homo sapiens
MATSQYFDFAQGGGPQYSAQPPTLPLPTVGASYTAQPTPGMDPAVNPAFPPAAPAGYGGYQPHSGQDFAYGSRPQEPVPTATTMATYQDSYSYGQSAAARSYEDRPYFQSAALQSGRMTAADSGQPGTQEACGQPSPHGSHSHAQPPQQAPIVESGQPASTLSSGYTYPTATGVQPESSASIVTSYPPPSYNPTCTAYTAPSYPNYDASVYSAASPFYPPAQPPPPPGPPQQLPPPPAPAGSGSSPRADSKPPLPSKLPRPKAGPRQLQLHYCDICKISCAGPQTYREHLGGQKHRKKEAAQKTGVQPNGSPRGVQAQLHCDLCAVSCTGADAYAAHIRGSKHQKVFKLHAKLGKPIPTLEPALATESPPGAEAKPTSPTGPSVCASSRPALAKRPVASKALCEGPPEPQAAGCRPQWGKPAQPKLEGPGAPTQGGSKEAPAGCSDAQPVGPEYVEEVFSDEGRVLRFHCKLCECSFNDLNAKDLHVRGRRHRLQYRKKVNPDLPIATEPSSRARKVLEERMRKQRHLAEERLEQLRRWHAERRRLEEEPPQDVPPHAPPDWAQPLLMGRPESPASAPLQPGRRPASSDDRHVMCKHATIYPTEQELLAVQRAVSHAERALKLVSDTLAEEDRGRREEEGDKRSSVAPQTRVLKGVMRVGILAKGLLLRGDRNVRLALLCSEKPTHSLLRRIAQQLPRQLQMVTEDEYEVSSDPEANIVISSCEEPRMQVTISVTSPLMREDPSTDPGVEEPQADAGDVLSPKKCLESLAALRHARWFQARASGLQPCVIVIRVLRDLCRRVPTWGALPAWAMELLVEKAVSSAAGPLGPGDAVRRVLECVATGTLLTDGPGLQDPCERDQTDALEPMTLQEREDVTASAQHALRMLAFRQTHKVLGMDLLPPRHRLGARFRKRQRGPGEGEEGAGEKKRGRRGGEGLV

SEQ ID NO: 4974 - protein, 366 aa, Homo sapiens
MATSQYFDFAQGGGPQYSAQPPTLPLPTVGASYTAQPTPGMDPAVNPAFPPAAPAGYGGYQPHSGQDFAYGSRPQEPVPTATTMATYQDSYSYGQSAAARSYEDRPYFQSAALQSGRMTAADSGQPGTQEACGQPSPHGSHSHAQPPQQAPIVESGQPASTLSSGYTYPTATGVQPESSASIVTSYPPPSYNPTCTAYTAPSYPNYDASVYSAASPFYPPAQPPPPPGPPQQLPPPPAPAGSGSSPRADSKPPLPSKLPRPKAGPRQLQLHYCDICKISCAGPQTYREHLGGQKHRKKEAAQKTGVQPNGSPRGVQAQLHCDLCAVSCTGADAYAAHIRGSKHQKGLLSHRQQAADPSGGNQPNLN

SEQ ID NO: 4975 - protein, 767 aa, Homo sapiens
MSFDPNLLHNNGHNGYPNGTSAALRETGVIEKLLTSYGFIQCSERQARLFFHCSQYNGNLQDLKVGDDVEFEVSSDRRTGKPIAVKLVKIKQEILPEERMNGQEVFYLTYTPEDVEGNVQLETGDKINFVIDNNKHTGAVSARNIMLLKKKQARCQGVVCAMKEAFGFIERGDVVKEIFFHYSEFKGDLETLQPGDDVEFTIKDRNGKEVATDVRLLPQGTVIFEDISIEHFEGTVTKVIPKVPSKNQNDPLPGRIKVDFVIPKELPFGDKDTKSKVTLLEGDHVRFNISTDRRDKLERATNIEVLSNTFQFTNEAREMGVIAAMRDGFGFIKCVDRDVRMFFHFSEILDGNQLHIADEVEFTVVPDMLSAQRNHAIRIKKLPKGTVSFHSHSDHRFLGTVEKEATFSNPKTTSPNKGKEKEAEDGIIAYDDCGVKLTIAFQAKDVEGSTSPQIGDKVEFSISDKQRPGQQVATCVRLLGRNSNSKRLLGYVATLKDNFGFIETANHDKEIFFHYSEFSGDVDSLELGDMVEYSLSKGKGNKVSAEKVNKTHSVNGITEEADPTIYSGKVIRPLRSVDPTQTEYQGMIEIVEEGDMKGEVYPFGIVGMANKGDCLQKGESVKFQLCVLGQNAQTMAYNITPLRRATVECVKDQFGFINYEVGDSKKLFFHVKEVQDGIELQAGDEVEFSVILNQRTGKCSACNVWRVCEGPKAVAAPRPDRLVNRLKNITLDDASAPRLMVLRQPRGPDNSMGFGAERKIRQAGVID

SEQ ID NO: 4976 - protein, 767 aa, Homo sapiens; identical to SEQ ID NO: 4975

SEQ ID NO: 4977 - protein, 798 aa, Homo sapiens
MSFDPNLLHNNGHNGYPNGTSAALRETGVIEKLLTSYGFIQCSERQARLFFHCSQYNGNLQDLKVGDDVEFEVSSDRRTGKPIAVKLVKIKQEILPEERMNGQVVCAVPHNLESKSPAAPGQSPTGSVCYERNGEVFYLTYTPEDVEGNVQLETGDKINFVIDNNKHTGAVSARNIMLLKKKQARCQGVVCAMKEAFGFIERGDVVKEIFFHYSEFKGDLETLQPGDDVEFTIKDRNGKEVATDVRLLPQGTVIFEDISIEHFEGTVTKVIPKVPSKNQNDPLPGRIKVDFVIPKELPFGDKDTKSKVTLLEGDHVRFNISTDRRDKLERATNIEVLSNTFQFTNEAREMGVIAAMRDGFGFIKCVDRDVRMFFHFSEILDGNQLHIADEVEFTVVPDMLSAQRNHAIRIKKLPKGTVSFHSHSDHRFLGTVEKEATFSNPKTTSPNKGKEKEAEDGIIAYDDCGVKLTIAFQAKDVEGSTSPQIGDKVEFSISDKQRPGQQVATCVRLLGRNSNSKRLLGYVATLKDNFGFIETANHDKEIFFHYSEFSGDVDSLELGDMVEYSLSKGKGNKVSAEKVNKTHSVNGITEEADPTIYSGKVIRPLRSVDPTQTEYQGMIEIVEEGDMKGEVYPFGIVGMANKGDCLQKGESVKFQLCVLGQNAQTMAYNITPLRRATVECVKDQFGFINYEVGDSKKLFFHVKEVQDGIELQAGDEVEFSVILNQRTGKCSACNVWRVCEGPKAVAAPRPDRLVNRLKNITLDDASAPRLMVLRQPRGPDNSMGFGAERKIRQAGVID

SEQ ID NO: 4978 - protein, 813 aa, Homo sapiens
MENVFTVSSDPHPSPAAPPSLSLPLSSSSTSSGTKKQKRTPTYQRSMSFDPNLLHNNGHNGYPNGTSAALRETGVIEKLLTSYGFIQCSERQARLFFHCSQYNGNLQDLKVGDDVEFEVSSDRRTGKPIAVKLVKIKQEILPEERMNGQEVFYLTYTPEDVEGNVQLETGDKINFVIDNNKHTGAVSARNIMLLKKKQARCQGVVCAMKEAFGFIERGDVVKEIFFHYSEFKGDLETLQPGDDVEFTIKDRNGKEVATDVRLLPQGTVIFEDISIEHFEGTVTKVIPKVPSKNQNDPLPGRIKVDFVIPKELPFGDKDTKSKVTLLEGDHVRFNISTDRRDKLERATNIEVLSNTFQFTNEAREMGVIAAMRDGFGFIKCVDRDVRMFFHFSEILDGNQLHIADEVEFTVVPDMLSAQRNHAIRIKKLPKGTVSFHSHSDHRFLGTVEKEATFSNPKTTSPNKGKEKEAEDGIIAYDDCGVKLTIAFQAKDVEGSTSPQIGDKVEFSISDKQRPGQQVATCVRLLGRNSNSKRLLGYVATLKDNFGFIETANHDKEIFFHYSEFSGDVDSLELGDMVEYSLSKGKGNKVSAEKVNKTHSVNGITEEADPTIYSGKVIRPLRSVDPTQTEYQGMIEIVEEGDMKGEVYPFGIVGMANKGDCLQKGESVKFQLCVLGQNAQTMAYNITPLRRATVECVKDQFGFINYEVGDSKKLFFHVKEVQDGIELQAGDEVEFSVILNQRTGKCSACNVWRVCEGPKAVAAPRPDRLVNRLKNITLDDASAPRLMVLRQPRGPDNSMGFGAERKIRQAGVID

SEQ ID NO: 4979 - protein, 844 aa, Homo sapiens
MENVFTVSSDPHPSPAAPPSLSLPLSSSSTSSGTKKQKRTPTYQRSMSFDPNLLHNNGHNGYPNGTSAALRETGVIEKLLTSYGFIQCSERQARLFFHCSQYNGNLQDLKVGDDVEFEVSSDRRTGKPIAVKLVKIKQEILPEERMNGQVVCAVPHNLESKSPAAPGQSPTGSVCYERNGEVFYLTYTPEDVEGNVQLETGDKINFVIDNNKHTGAVSARNIMLLKKKQARCQGVVCAMKEAFGFIERGDVVKEIFFHYSEFKGDLETLQPGDDVEFTIKDRNGKEVATDVRLLPQGTVIFEDISIEHFEGTVTKVIPKVPSKNQNDPLPGRIKVDFVIPKELPFGDKDTKSKVTLLEGDHVRFNISTDRRDKLERATNIEVLSNTFQFTNEAREMGVIAAMRDGFGFIKCVDRDVRMFFHFSEILDGNQLHIADEVEFTVVPDMLSAQRNHAIRIKKLPKGTVSFHSHSDHRFLGTVEKEATFSNPKTTSPNKGKEKEAEDGIIAYDDCGVKLTIAFQAKDVEGSTSPQIGDKVEFSISDKQRPGQQVATCVRLLGRNSNSKRLLGYVATLKDNFGFIETANHDKEIFFHYSEFSGDVDSLELGDMVEYSLSKGKGNKVSAEKVNKTHSVNGITEEADPTIYSGKVIRPLRSVDPTQTEYQGMIEIVEEGDMKGEVYPFGIVGMANKGDCLQKGESVKFQLCVLGQNAQTMAYNITPLRRATVECVKDQFGFINYEVGDSKKLFFHVKEVQDGIELQAGDEVEFSVILNQRTGKCSACNVWRVCEGPKAVAAPRPDRLVNRLKNITLDDASAPRLMVLRQPRGPDNSMGFGAERKIRQAGVID

SEQ ID NO: 4980 - protein, 46 aa, Homo sapiens
MSFDPNLLHNNGHNGYPNGTSAALRETGVIEKLLTSYGFIQCSERQ

SEQ ID NO: 4981 - protein, 7 aa, Homo sapiens
MSFDPNL

SEQ ID NO: 4982 - protein, 668 aa, Homo sapiens
MNGQEVFYLTYTPEDVEGNVQLETGDKINFVIDNNKHTGAVSARNIMLLKKKQARCQGVVCAMKEAFGFIERGDVVKEIFFHYSEFKGDLETLQPGDDVEFTIKDRNGKEVATDVRLLPQGTVIFEDISIEHFEGTVTKVIPKVPSKNQNDPLPGRIKVDFVIPKELPFGDKDTKSKVTLLEGDHVRFNISTDRRDKLERATNIEVLSNTFQFTNEAREMGVIAAMRDGFGFIKCVDRDVRMFFHFSEILDGNQLHIADEVEFTVVPDMLSAQRNHAIRIKKLPKGTVSFHSHSDHRFLGTVEKEATFSNPKTTSPNKGKEKEAEDGIIAYDDCGVKLTIAFQAKDVEGSTSPQIGDKVEFSISDKQRPGQQVATCVRLLGRNSNSKRLLGYVATLKDNFGFIETANHDKEIFFHYSEFSGDVDSLELGDMVEYSLSKGKGNKVSAEKVNKTHSVNGITEEADPTIYSGKVIRPLRSVDPTQTEYQGMIEIVEEGDMKGEVYPFGIVGMANKGDCLQKGESVKFQLCVLGQNAQTMAYNITPLRRATVECVKDQFGFINYEVGDSKKLFFHVKEVQDGIELQAGDEVEFSVILNQRTGKCSACNVWRVCEGPKAVAAPRPDRLVNRLKNITLDDASAPRLMVLRQPRGPDNSMGFGAERKIRQAGVID

SEQ ID NO: 4983 - protein, 95 aa, Homo sapiens
MSFDPNLLHNNGHNGYPNGTSAALRETGVIEKLLTSYGFIQCSERQARLFFHCSQYNGNLQDLKVGDDVEFEVSSDRRTGKPIAVKLVKIKQEIL

SEQ ID NO: 4984 - protein, 798 aa, Homo sapiens; identical to SEQ ID NO: 4977

SEQ ID NO: 4985 - DNA, 824 bp, synthetic construct
  misc_feature 1..824: note = Description of Artificial Sequence: Synthetic Transcript Sequence
  source 1..824: mol_type = other DNA
taatacgactcactatagggaaataagagagaaaagaagagtaagaagaaatataagagccaccatggccggtcccgcgacccaaagccccatgaaacttatggccctgcagttgctgctttggcactcggccctctggacagtccaagaagcgactcctctcggacctgcctcatcgttgccgcagtcattccttttgaagtgtctggagcaggtgcgaaagattcagggcgatggagccgcactccaagagaagctctgcgcgacatacaaactttgccatcccgaggagctcgtactgctcgggcacagcttggggattccctgggctcctctctcgtcctgtccgtcgcaggctttgcagttggcagggtgcctttcccagctccactccggtttgttcttgtatcagggactgctgcaagcccttgagggaatctcgccagaattgggcccgacgctggacacgttgcagctcgacgtggcggatttcgcaacaaccatctggcagcagatggaggaactggggatggcacccgcgctgcagcccacgcagggggcaatgccggcctttgcgtccgcgtttcagcgcagggcgggtggagtcctcgtagcgagccaccttcaatcatttttggaagtctcgtaccgggtgctgagacatcttgcgcagccgtgataataggctgccttctgcggggcttgccttctggccatgcccttcttctctcccttgcacctgtacctctagtagtgctttctactttatgtggtctttgaataaagcctgagtaggaaggcggccgctcgagcatgcatctaga

SEQ ID NO: 4986 - RNA, 782 nt, synthetic construct
  misc_feature 1..782: note = Description of Artificial Sequence: Synthetic Transcript Sequence
  source 1..782: mol_type = other RNA
gggaaataagagagaaaagaagagtaagaagaaatataagagccaccatggccggtcccgcgacccaaagccccatgaaacttatggccctgcagttgctgctttggcactcggccctctggacagtccaagaagcgactcctctcggacctgcctcatcgttgccgcagtcattccttttgaagtgtctggagcaggtgcgaaagattcagggcgatggagccgcactccaagagaagctctgcgcgacatacaaactttgccatcccgaggagctcgtactgctcgggcacagcttggggattccctgggctcctctctcgtcctgtccgtcgcaggctttgcagttggcagggtgcctttcccagctccactccggtttgttcttgtatcagggactgctgcaagcccttgagggaatctcgccagaattgggcccgacgctggacacgttgcagctcgacgtggcggatttcgcaacaaccatctggcagcagatggaggaactggggatggcacccgcgctgcagcccacgcagggggcaatgccggcctttgcgtccgcgtttcagcgcagggcgggtggagtcctcgtagcgagccaccttcaatcatttttggaagtctcgtaccgggtgctgagacatcttgcgcagccgtgataataggctgccttctgcggggcttgccttctggccatgcccttcttctctcccttgcacctgtacctctagtagtgctttctactttatgtggtctttgaataaagcctgagtaggaag

SEQ ID NO: 4987 - DNA, 810 bp, synthetic construct
  misc_feature 1..810: note = Description of Artificial Sequence: Synthetic Transcript Sequence
  source 1..810: mol_type = other DNA
taatacgactcactatagggaaataagagagaaaagaagagtaagaagaaatataagagccaccatggccggtcccgcgacccaaagccccatgaaacttatggccctgcagttgctgctttggcactcggccctctggacagtccaagaagcgactcctctcggacctgcctcatcgttgccgcagtcattccttttgaagtgtctggagcaggtgcgaaagattcagggcgatggagccgcactccaagagaagctctgcgcgacatacaaactttgccatcccgaggagctcgtactgctcgggcacagcttggggattccctgggctcctctctcgtcctgtccgtcgcaggctttgcagttggcagggtgcctttcccagctccactccggtttgttcttgtatcagggactgctgcaagcccttgagggaatctcgccagaattgggcccgacgctggacacgttgcagctcgacgtggcggatttcgcaacaaccatctggcagcagatggaggaactggggatggcacccgcgctgcagcccacgcagggggcaatgccggcctttgcgtccgcgtttcagcgcagggcgggtggagtcctcgtagcgagccaccttcaatcatttttggaagtctcgtaccgggtgctgagacatcttgcgcagccgtgataataggctgccttctgcggggcttgccttctggccatgcccttcttctctcccttgcacctgtacctctactttattggtctttgaataaagcctgagtaggaaggcggccgctcgagcatgcatctaga

SEQ ID NO: 4988 - RNA, 768 nt, synthetic construct
  misc_feature 1..768: note = Description of Artificial Sequence: Synthetic Transcript Sequence
  source 1..768: mol_type = other RNA
gggaaataagagagaaaagaagagtaagaagaaatataagagccaccatggccggtcccgcgacccaaagccccatgaaacttatggccctgcagttgctgctttggcactcggccctctggacagtccaagaagcgactcctctcggacctgcctcatcgttgccgcagtcattccttttgaagtgtctggagcaggtgcgaaagattcagggcgatggagccgcactccaagagaagctctgcgcgacatacaaactttgccatcccgaggagctcgtactgctcgggcacagcttggggattccctgggctcctctctcgtcctgtccgtcgcaggctttgcagttggcagggtgcctttcccagctccactccggtttgttcttgtatcagggactgctgcaagcccttgagggaatctcgccagaattgggcccgacgctggacacgttgcagctcgacgtggcggatttcgcaacaaccatctggcagcagatggaggaactggggatggcacccgcgctgcagcccacgcagggggcaatgccggcctttgcgtccgcgtttcagcgcagggcgggtggagtcctcgtagcgagccaccttcaatcatttttggaagtctcgtaccgggtgctgagacatcttgcgcagccgtgataataggctgccttctgcggggcttgccttctggccatgcccttcttctctcccttgcacctgtacctctactttattggtctttgaataaagcctgagtaggaag

SEQ ID NO: 4989 - DNA, 817 bp, synthetic construct
  misc_feature 1..817: note = Description of Artificial Sequence: Synthetic Transcript Sequence
  source 1..817: mol_type = other DNA
taatacgactcactatagggaaataagagagaaaagaagagtaagaagaaatataagagccaccatggccggtcccgcgacccaaagccccatgaaacttatggccctgcagttgctgctttggcactcggccctctggacagtccaagaagcgactcctctcggacctgcctcatcgttgccgcagtcattccttttgaagtgtctggagcaggtgcgaaagattcagggcgatggagccgcactccaagagaagctctgcgcgacatacaaactttgccatcccgaggagctcgtactgctcgggcacagcttggggattccctgggctcctctctcgtcctgtccgtcgcaggctttgcagttggcagggtgcctttcccagctccactccggtttgttcttgtatcagggactgctgcaagcccttgagggaatctcgccagaattgggcccgacgctggacacgttgcagctcgacgtggcggatttcgcaacaaccatctggcagcagatggaggaactggggatggcacccgcgctgcagcccacgcagggggcaatgccggcctttgcgtccgcgtttcagcgcagggcgggtggagtcctcgtagcgagccaccttcaatcatttttggaagtctcgtaccgggtgctgagacatcttgcgcagccgtgataataggctgccttctgcggggcttgccttctggccatgcccttcttctctcccttgcacctgtacctctagtagtgctttctgtggtctttgaataaagcctgagtaggaaggcggccgctcgagcatgcatctaga

SEQ ID NO: 4990 - RNA, 775 nt, synthetic construct
  misc_feature 1..775: note = Description of Artificial Sequence: Synthetic Transcript Sequence
  source 1..775: mol_type = other RNA
gggaaataagagagaaaagaagagtaagaagaaatataagagccaccatggccggtcccgcgacccaaagccccatgaaacttatggccctgcagttgctgctttggcactcggccctctggacagtccaagaagcgactcctctcggacctgcctcatcgttgccgcagtcattccttttgaagtgtctggagcaggtgcgaaagattcagggcgatggagccgcactccaagagaagctctgcgcgacatacaaactttgccatcccgaggagctcgtactgctcgggcacagcttggggattccctgggctcctctctcgtcctgtccgtcgcaggctttgcagttggcagggtgcctttcccagctccactccggtttgttcttgtatcagggactgctgcaagcccttgagggaatctcgccagaattgggcccgacgctggacacgttgcagctcgacgtggcggatttcgcaacaaccatctggcagcagatggaggaactggggatggcacccgcgctgcagcccacgcagggggcaatgccggcctttgcgtccgcgtttcagcgcagggcgggtggagtcctcgtagcgagccaccttcaatcatttttggaagtctcgtaccgggtgctgagacatcttgcgcagccgtgataataggctgccttctgcggggcttgccttctggccatgcccttcttctctcccttgcacctgtacctctagtagtgctttctgtggtctttgaataaagcctgagtaggaag

SEQ ID NO: 4991 - DNA, 826 bp, synthetic construct
  misc_feature 1..826: note = Description of Artificial Sequence: Synthetic Transcript Sequence
  source 1..826: mol_type = other DNA
taatacgactcactatagggaaataagagagaaaagaagagtaagaagaaatataagagccaccatggccggtcccgcgacccaaagccccatgaaacttatggccctgcagttgctgctttggcactcggccctctggacagtccaagaagcgactcctctcggacctgcctcatcgttgccgcagtcattccttttgaagtgtctggagcaggtgcgaaagattcagggcgatggagccgcactccaagagaagctctgcgcgacatacaaactttgccatcccgaggagctcgtactgctcgggcacagcttggggattccctgggctcctctctcgtcctgtccgtcgcaggctttgcagttggcagggtgcctttcccagctccactccggtttgttcttgtatcagggactgctgcaagcccttgagggaatctcgccagaattgggcccgacgctggacacgttgcagctcgacgtggcggatttcgcaacaaccatctggcagcagatggaggaactggggatggcacccgcgctgcagcccacgcagggggcaatgccggcctttgcgtccgcgtttcagcgcagggcgggtggagtcctcgtagcgagccaccttcaatcatttttggaagtctcgtaccgggtgctgagacatcttgcgcagccgtgataataggctgccttctgcggggcttgccttctggccatgcccttcttctctcccttgcacctgtacctcttccataaagtaggaaacactacatggtctttgaataaagcctgagtaggaaggcggccgctcgagcatgcatctaga

SEQ ID NO: 4992 - RNA, 784 nt, synthetic construct
  misc_feature 1..784: note = Description of Artificial Sequence: Synthetic Transcript Sequence
  source 1..784: mol_type = other RNA
gggaaataagagagaaaagaagagtaagaagaaatataagagccaccatggccggtcccgcgacccaaagccccatgaaacttatggccctgcagttgctgctttggcactcggccctctggacagtccaagaagcgactcctctcggacctgcctcatcgttgccgcagtcattccttttgaagtgtctggagcaggtgcgaaagattcagggcgatggagccgcactccaagagaagctctgcgcgacatacaaactttgccatcccgaggagctcgtactgctcgggcacagcttggggattccctgggctcctctctcgtcctgtccgtcgcaggctttgcagttggcagggtgcctttcccagctccactccggtttgttcttgtatcagggactgctgcaagcccttgagggaatctcgccagaattgggcccgacgctggacacgttgcagctcgacgtggcggatttcgcaacaaccatctggcagcagatggaggaactggggatggcacccgcgctgcagcccacgcagggggcaatgccggcctttgcgtccgcgtttcagcgcagggcgggtggagtcctcgtagcgagccaccttcaatcatttttggaagtctcgtaccgggtgctgagacatcttgcgcagccgtgataataggctgccttctgcggggcttgccttctggccatgcccttcttctctcccttgcacctgtacctcttccataaagtaggaaacactacatggtctttgaataaagcctgagtaggaag

SEQ ID NO: 4993 - DNA, 810 bp, synthetic construct
  misc_feature 1..810: note = Description of Artificial Sequence: Synthetic Transcript Sequence
  source 1..810: mol_type = other DNA
taatacgactcactatagggaaataagagagaaaagaagagtaagaagaaatataagagccaccatggccggtcccgcgacccaaagccccatgaaacttatggccctgcagttgctgctttggcactcggccctctggacagtccaagaagcgactcctctcggacctgcctcatcgttgccgcagtcattccttttgaagtgtctggagcaggtgcgaaagattcagggcgatggagccgcactccaagagaagctctgcgcgacatacaaactttgccatcccgaggagctcgtactgctcgggcacagcttggggattccctgggctcctctctcgtcctgtccgtcgcaggctttgcagttggcagggtgcctttcccagctccactccggtttgttcttgtatcagggactgctgcaagcccttgagggaatctcgccagaattgggcccgacgctggacacgttgcagctcgacgtggcggatttcgcaacaaccatctggcagcagatggaggaactggggatggcacccgcgctgcagcccacgcagggggcaatgccggcctttgcgtccgcgtttcagcgcagggcgggtggagtcctcgtagcgagccaccttcaatcatttttggaagtctcgtaccgggtgctgagacatcttgcgcagccgtgataataggctgccttctgcggggcttgccttctggccatgcccttcttctctcccttgcacctgtacctctacactactggtctttgaataaagcctgagtaggaaggcggccgctcgagcatgcatctaga

SEQ ID NO: 4994 - RNA, 768 nt, synthetic construct
  misc_feature 1..768: note = Description of Artificial Sequence: Synthetic Transcript Sequence
  source 1..768: mol_type = other RNA
gggaaataagagagaaaagaagagtaagaagaaatataagagccaccatggccggtcccgcgacccaaagccccatgaaacttatggccctgcagttgctgctttggcactcggccctctggacagtccaagaagcgactcctctcggacctgcctcatcgttgccgcagtcattccttttgaagtgtctggagcaggtgcgaaagattcagggcgatggagccgcactccaagagaagctctgcgcgacatacaaactttgccatcccgaggagctcgtactgctcgggcacagcttggggattccctgggctcctctctcgtcctgtccgtcgcaggctttgcagttggcagggtgcctttcccagctccactccggtttgttcttgtatcagggactgctgcaagcccttgagggaatctcgccagaattgggcccgacgctggacacgttgcagctcgacgtggcggatttcgcaacaaccatctggcagcagatggaggaactggggatggcacccgcgctgcagcccacgcagggggcaatgccggcctttgcgtccgcgtttcagcgcagggcgggtggagtcctcgtagcgagccaccttcaatcatttttggaagtctcgtaccgggtgctgagacatcttgcgcagccgtgataataggctgccttctgcggggcttgccttctggccatgcccttcttctctcccttgcacctgtacctctacactactggtctttgaataaagcctgagtaggaag

SEQ ID NO: 4995 - DNA, 819 bp, synthetic construct
  misc_feature 1..819: note = Description of Artificial Sequence: Synthetic Transcript Sequence
  source 1..819: mol_type = other DNA
taatacgactcactatagggaaataagagagaaaagaagagtaagaagaaatataagagccaccatggccggtcccgcgacccaaagccccatgaaacttatggccctgcagttgctgctttggcactcggccctctggacagtccaagaagcgactcctctcggacctgcctcatcgttgccgcagtcattccttttgaagtgtctggagcaggtgcgaaagattcagggcgatggagccgcactccaagagaagctctgcgcgacatacaaactttgccatcccgaggagctcgtactgctcgggcacagcttggggattccctgggctcctctctcgtcctgtccgtcgcaggctttgcagttggcagggtgcctttcccagctccactccggtttgttcttgtatcagggactgctgcaagcccttgagggaatctcgccagaattgggcccgacgctggacacgttgcagctcgacgtggcggatttcgcaacaaccatctggcagcagatggaggaactggggatggcacccgcgctgcagcccacgcagggggcaatgccggcctttgcgtccgcgtttcagcgcagggcgggtggagtcctcgtagcgagccaccttcaatcatttttggaagtctcgtaccgggtgctgagacatcttgcgcagccgtgataataggctgccttctgcggggcttgccttctggccatgcccttcttctctcccttgcacctgtacctcttccataaagtaggaaatggtctttgaataaagcctgagtaggaaggcggccgctcgagcatgcatctaga

SEQ ID NO: 4996 - RNA, 777 nt, synthetic construct
  misc_feature 1..777: note = Description of Artificial Sequence: Synthetic Transcript Sequence
  source 1..777: mol_type = other RNA
gggaaataagagagaaaagaagagtaagaagaaatataagagccaccatggccggtcccgcgacccaaagccccatgaaacttatggccctgcagttgctgctttggcactcggccctctggacagtccaagaagcgactcctctcggacctgcctcatcgttgccgcagtcattccttttgaagtgtctggagcaggtgcgaaagattcagggcgatggagccgcactccaagagaagctctgcgcgacatacaaactttgccatcccgaggagctcgtactgctcgggcacagcttggggattccctgggctcctctctcgtcctgtccgtcgcaggctttgcagttggcagggtgcctttcccagctccactccggtttgttcttgtatcagggactgctgcaagcccttgagggaatctcgccagaattgggcccgacgctggacacgttgcagctcgacgtggcggatttcgcaacaaccatctggcagcagatggaggaactggggatggcacccgcgctgcagcccacgcagggggcaatgccggcctttgcgtccgcgtttcagcgcagggcgggtggagtcctcgtagcgagccaccttcaatcatttttggaagtctcgtaccgggtgctgagacatcttgcgcagccgtgataataggctgccttctgcggggcttgccttctggccatgcccttcttctctcccttgcacctgtacctcttccataaagtaggaaatggtctttgaataaagcctgagtaggaag

SEQ ID NO: 4997 - DNA, 825 bp, synthetic construct
  misc_feature 1..825: note = Description of Artificial Sequence: Synthetic Transcript Sequence
  source 1..825: mol_type = other DNA
taatacgactcactatagggaaataagagagaaaagaagagtaagaagaaatataagagccaccatggccggtcccgcgacccaaagccccatgaaacttatggccctgcagttgctgctttggcactcggccctctggacagtccaagaagcgactcctctcggacctgcctcatcgttgccgcagtcattccttttgaagtgtctggagcaggtgcgaaagattcagggcgatggagccgcactccaagagaagctctgcgcgacatacaaactttgccatcccgaggagctcgtactgctcgggcacagcttggggattccctgggctcctctctcgtcctgtccgtcgcaggctttgcagttggcagggtgcctttcccagctccactccggtttgttcttgtatcagggactgctgcaagcccttgagggaatctcgccagaattgggcccgacgctggacacgttgcagctcgacgtggcggatttcgcaacaaccatctggcagcagatggaggaactggggatggcacccgcgctgcagcccacgcagggggcaatgccggcctttgcgtccgcgtttcagcgcagggcgggtggagtcctcgtagcgagccaccttcaatcatttttggaagtctcgtaccgggtgctgagacatcttgcgcagccgtgataataggctgccttctgcggggcttgccttctggccatgcccttcttctctcccttgcacctgtacctctaacccatggaattcagttctcatggtctttgaataaagcctgagtaggaaggcggccgctcgagcatgcatctaga

SEQ ID NO: 4998 - RNA, 783 nt, synthetic construct
  misc_feature 1..783: note = Description of Artificial Sequence: Synthetic Transcript Sequence
  source 1..783: mol_type = other RNA
gggaaataagagagaaaagaagagtaagaagaaatataagagccaccatggccggtcccgcgacccaaagccccatgaaacttatggccctgcagttgctgctttggcactcggccctctggacagtccaagaagcgactcctctcggacctgcctcatcgttgccgcagtcattccttttgaagtgtctggagcaggtgcgaaagattcagggcgatggagccgcactccaagagaagctctgcgcgacatacaaactttgccatcccgaggagctcgtactgctcgggcacagcttggggattccctgggctcctctctcgtcctgtccgtcgcaggctttgcagttggcagggtgcctttcccagctccactccggtttgttcttgtatcagggactgctgcaagcccttgagggaatctcgccagaattgggcccgacgctggacacgttgcagctcgacgtggcggatttcgcaacaaccatctggcagcagatggaggaactggggatggcacccgcgctgcagcccacgcagggggcaatgccggcctttgcgtccgcgtttcagcgcagggcgggtggagtcctcgtagcgagccaccttcaatcatttttggaagtctcgtaccgggtgctgagacatcttgcgcagccgtgataataggctgccttctgcggggcttgccttctggccatgcccttcttctctcccttgcacctgtacctctaacccatggaattcagttctcatggtctttgaataaagcctgagtaggaag

SEQ ID NO: 4999 - DNA, 810 bp, synthetic construct
  misc_feature 1..810: note = Description of Artificial Sequence: Synthetic Transcript Sequence
  source 1..810: mol_type = other DNA
taatacgactcactatagggaaataagagagaaaagaagagtaagaagaaatataagagccaccatggccggtcccgcgacccaaagccccatgaaacttatggccctgcagttgctgctttggcactcggccctctggacagtccaagaagcgactcctctcggacctgcctcatcgttgccgcagtcattccttttgaagtgtctggagcaggtgcgaaagattcagggcgatggagccgcactccaagagaagctctgcgcgacatacaaactttgccatcccgaggagctcgtactgctcgggcacagcttggggattccctgggctcctctctcgtcctgtccgtcgcaggctttgcagttggcagggtgcctttcccagctccactccggtttgttcttgtatcagggactgctgcaagcccttgagggaatctcgccagaattgggcccgacgctggacacgttgcagctcgacgtggcggatttcgcaacaaccatctggcagcagatggaggaactggggatggcacccgcgctgcagcccacgcagggggcaatgccggcctttgcgtccgcgtttcagcgcagggcgggtggagtcctcgtagcgagccaccttcaatcatttttggaagtctcgtaccgggtgctgagacatcttgcgcagccgtgataataggctgccttctgcggggcttgccttctggccatgcccttcttctctcccttgcacctgtacctctagttctctggtctttgaataaagcctgagtaggaaggcggccgctcgagcatgcatctaga

SEQ ID NO: 5000 - RNA, 768 nt, synthetic construct
  misc_feature 1..768: note = Description of Artificial Sequence: Synthetic Transcript Sequence
  source 1..768: mol_type = other RNA
gggaaataagagagaaaagaagagtaagaagaaatataagagccaccatggccggtcccgcgacccaaagccccatgaaacttatggccctgcagttgctgctttggcactcggccctctggacagtccaagaagcgactcctctcggacctgcctcatcgttgccgcagtcattccttttgaagtgtctggagcaggtgcgaaagattcagggcgatggagccgcactccaagagaagctctgcgcgacatacaaactttgccatcccgaggagctcgtactgctcgggcacagcttggggattccctgggctcctctctcgtcctgtccgtcgcaggctttgcagttggcagggtgcctttcccagctccactccggtttgttcttgtatcagggactgctgcaagcccttgagggaatctcgccagaattgggcccgacgctggacacgttgcagctcgacgtggcggatttcgcaacaaccatctggcagcagatggaggaactggggatggcacccgcgctgcagcccacgcagggggcaatgccggcctttgcgtccgcgtttcagcgcagggcgggtggagtcctcgtagcgagccaccttcaatcatttttggaagtctcgtaccgggtgctgagacatcttgcgcagccgtgataataggctgccttctgcggggcttgccttctggccatgcccttcttctctcccttgcacctgtacctctagttctctggtctttgaataaagcctgagtaggaag

SEQ ID NO: 5001 - DNA, 818 bp, synthetic construct
  misc_feature 1..818: note = Description of Artificial Sequence: Synthetic Transcript Sequence
  source 1..818: mol_type = other DNA
taatacgactcactatagggaaataagagagaaaagaagagtaagaagaaatataagagccaccatggccggtcccgcgacccaaagccccatgaaacttatggccctgcagttgctgctttggcactcggccctctggacagtccaagaagcgactcctctcggacctgcctcatcgttgccgcagtcattccttttgaagtgtctggagcaggtgcgaaagattcagggcgatggagccgcactccaagagaagctctgcgcgacatacaaactttgccatcccgaggagctcgtactgctcgggcacagcttggggattccctgggctcctctctcgtcctgtccgtcgcaggctttgcagttggcagggtgcctttcccagctccactccggtttgttcttgtatcagggactgctgcaagcccttgagggaatctcgccagaattgggcccgacgctggacacgttgcagctcgacgtggcggatttcgcaacaaccatctggcagcagatggaggaactggggatggcacccgcgctgcagcccacgcagggggcaatgccggcctttgcgtccgcgtttcagcgcagggcgggtggagtcctcgtagcgagccaccttcaatcatttttggaagtctcgtaccgggtgctgagacatcttgcgcagccgtgataataggctgccttctgcggggcttgccttctggccatgcccttcttctctcccttgcacctgtacctctaacccatggaattcatggtctttgaataaagcctgagtaggaaggcggccgctcgagcatgcatctaga

SEQ ID NO: 5002 - RNA, 776 nt, synthetic construct
  misc_feature 1..776: note = Description of Artificial Sequence: Synthetic Transcript Sequence
  source 1..776: mol_type = other RNA
gggaaataagagagaaaagaagagtaagaagaaatataagagccaccatggccggtcccgcgacccaaagccccatgaaacttatggccctgcagttgctgctttggcactcggccctctggacagtccaagaagcgactcctctcggacctgcctcatcgttgccgcagtcattccttttgaagtgtctggagcaggtgcgaaagattcagggcgatggagccgcactccaagagaagctctgcgcgacatacaaactttgccatcccgaggagctcgtactgctcgggcacagcttggggattccctgggctcctctctcgtcctgtccgtcgcaggctttgcagttggcagggtgcctttcccagctccactccggtttgttcttgtatcagggactgctgcaagcccttgagggaatctcgccagaattgggcccgacgctggacacgttgcagctcgacgtggcggatttcgcaacaaccatctggcagcagatggaggaactggggatggcacccgcgctgcagcccacgcagggggcaatgccggcctttgcgtccgcgtttcagcgcagggcgggtggagtcctcgtagcgagccaccttcaatcatttttggaagtctcgtaccgggtgctgagacatcttgcgcagccgtgataataggctgccttctgcggggcttgccttctggccatgcccttcttctctcccttgcacctgtacctctaacccatggaattcatggtctttgaataaagcctgagtaggaag

SEQ ID NO: 5003 - DNA, 1436 bp, synthetic construct
  misc_feature 1..1436: note = Description of Artificial Sequence: Synthetic Transcript Sequence
  source 1..1436: mol_type = other DNA
taatacgactcactatagggaaataagagagaaaagaagagtaagaagaaatataagagccacctcgtgaggatctatttccggtgaattcctcgagactagttctagagcggccgcggatcccgcccctctccctcccccccccctaacgttactggccgaagccgcttggaataaggccggtgtgcgtttgtctatatgttattttccaccatattgccgtcttttggcaatgtgagggcccggaaacctggccctgtcttcttgacgagcattcctaggggtctttcccctctcgccaaaggaatgcaaggtctgttgaatgtcgtgaaggaagcagttcctctggaagcttcttgaagacaaacaacgtctgtagcgaccctttgcaggcagcggaaccccccacctggcgacaggtgcctctgcggccaaaagccacgtgtataagatacacctgcaaaggcggcacaaccccagtgccacgttgtgagttggatagttgtggaaagagtcaaatggctcacctcaagcgtattcaacaaggggctgaaggatgcccagaaggtaccccattgtatgggatctgatctggggcctcggtgcacatgctttacatgtgtttagtcgaggttaaaaaacgtctaggccccccgaaccacggggacgtggttttcctttgaaaaacacgatgataatatggccggtcccgcgacccaaagccccatgaaacttatggccctgcagttgctgctttggcactcggccctctggacagtccaagaagcgactcctctcggacctgcctcatcgttgccgcagtcattccttttgaagtgtctggagcaggtgcgaaagattcagggcgatggagccgcactccaagagaagctctgcgcgacatacaaactttgccatcccgaggagctcgtactgctcgggcacagcttggggattccctgggctcctctctcgtcctgtccgtcgcaggctttgcagttggcagggtgcctttcccagctccactccggtttgttcttgtatcagggactgctgcaagcccttgagggaatctcgccagaattgggcccgacgctggacacgttgcagctcgacgtggcggatttcgcaacaaccatctggcagcagatggaggaactggggatggcacccgcgctgcagcccacgcagggggcaatgccggcctttgcgtccgcgtttcagcgcagggcgggtggagtcctcgtagcgagccaccttcaatcatttttggaagtctcgtaccgggtgctgagacatcttgcgcagccgtgataataggctggagcctcggtggccatgcttcttgccccttgggcctccccccagcccctcctccccttcctgcacccgtacccccgtggtctttgaataaagtctgagtgggcggctctaga

SEQ ID NO: 5004 - RNA, 1413 nt, synthetic construct
  misc_feature 1..1413: note = Description of Artificial Sequence: Synthetic Transcript Sequence
  source 1..1413: mol_type = other RNA
gggaaataagagagaaaagaagagtaagaagaaatataagagccacctcgtgaggatctatttccggtgaattcctcgagactagttctagagcggccgcggatcccgcccctctccctcccccccccctaacgttactggccgaagccgcttggaataaggccggtgtgcgtttgtctatatgttattttccaccatattgccgtcttttggcaatgtgagggcccggaaacctggccctgtcttcttgacgagcattcctaggggtctttcccctctcgccaaaggaatgcaaggtctgttgaatgtcgtgaaggaagcagttcctctggaagcttcttgaagacaaacaacgtctgtagcgaccctttgcaggcagcggaaccccccacctggcgacaggtgcctctgcggccaaaagccacgtgtataagatacacctgcaaaggcggcacaaccccagtgccacgttgtgagttggatagttgtggaaagagtcaaatggctcacctcaagcgtattcaacaaggggctgaaggatgcccagaaggtaccccattgtatgggatctgatctggggcctcggtgcacatgctttacatgtgtttagtcgaggttaaaaaacgtctaggccccccgaaccacggggacgtggttttcctttgaaaaacacgatgataatatggccggtcccgcgacccaaagccccatgaaacttatggccctgcagttgctgctttggcactcggccctctggacagtccaagaagcgactcctctcggacctgcctcatcgttgccgcagtcattccttttgaagtgtctggagcaggtgcgaaagattcagggcgatggagccgcactccaagagaagctctgcgcgacatacaaactttgccatcccgaggagctcgtactgctcgggcacagcttggggattccctgggctcctctctcgtcctgtccgtcgcaggctttgcagttggcagggtgcctttcccagctccactccggtttgttcttgtatcagggactgctgcaagcccttgagggaatctcgccagaattgggcccgacgctggacacgttgcagctcgacgtggcggatttcgcaacaaccatctggcagcagatggaggaactggggatggcacccgcgctgcagcccacgcagggggcaatgccggcctttgcgtccgcgtttcagcgcagggcgggtggagtcctcgtagcgagccaccttcaatcatttttggaagtctcgtaccgggtgctgagacatcttgcgcagccgtgataataggctggagcctcggtggccatgcttcttgccccttgggcctccccccagcccctcctccccttcctgcacccgtacccccgtggtctttgaataaagtctgagtgggcggc

SEQ ID NO: 5005 - DNA, 1430 bp, synthetic construct
  misc_feature 1..1430: note = Description of Artificial Sequence: Synthetic Transcript Sequence
  source 1..1430: mol_type = other DNA
taatacgactcactatagggaaataagagagaaaagaagagtaagaagaaatataagatcgtgaggatctatttccggtgaattcctcgagactagttctagagcggccgcggatcccgcccctctccctcccccccccctaacgttactggccgaagccgcttggaataaggccggtgtgcgtttgtctatatgttattttccaccatattgccgtcttttggcaatgtgagggcccggaaacctggccctgtcttcttgacgagcattcctaggggtctttcccctctcgccaaaggaatgcaaggtctgttgaatgtcgtgaaggaagcagttcctctggaagcttcttgaagacaaacaacgtctgtagcgaccctttgcaggcagcggaaccccccacctggcgacaggtgcctctgcggccaaaagccacgtgtataagatacacctgcaaaggcggcacaaccccagtgccacgttgtgagttggatagttgtggaaagagtcaaatggctcacctcaagcgtattcaacaaggggctgaaggatgcccagaaggtaccccattgtatgggatctgatctggggcctcggtgcacatgctttacatgtgtttagtcgaggttaaaaaacgtctaggccccccgaaccacggggacgtggttttcctttgaaaaacacgatgataatatggccggtcccgcgacccaaagccccatgaaacttatggccctgcagttgctgctttggcactcggccctctggacagtccaagaagcgactcctctcggacctgcctcatcgttgccgcagtcattccttttgaagtgtctggagcaggtgcgaaagattcagggcgatggagccgcactccaagagaagctctgcgcgacatacaaactttgccatcccgaggagctcgtactgctcgggcacagcttggggattccctgggctcctctctcgtcctgtccgtcgcaggctttgcagttggcagggtgcctttcccagctccactccggtttgttcttgtatcagggactgctgcaagcccttgagggaatctcgccagaattgggcccgacgctggacacgttgcagctcgacgtggcggatttcgcaacaaccatctggcagcagatggaggaactggggatggcacccgcgctgcagcccacgcagggggcaatgccggcctttgcgtccgcgtttcagcgcagggcgggtggagtcctcgtagcgagccaccttcaatcatttttggaagtctcgtaccgggtgctgagacatcttgcgcagccgtgataataggctggagcctcggtggccatgcttcttgccccttgggcctccccccagcccctcctccccttcctgcacccgtacccccgtggtctttgaataaagtctgagtgggcggctctaga

SEQ ID NO: 5006 - RNA, 1407 nt, synthetic construct
  misc_feature 1..1407: note = Description of Artificial Sequence: Synthetic Transcript Sequence
  source 1..1407: mol_type = other RNA
gggaaataagagagaaaagaagagtaagaagaaatataagatcgtgaggatctatttccggtgaattcctcgagactagttctagagcggccgcggatcccgcccctctccctcccccccccctaacgttactggccgaagccgcttggaataaggccggtgtgcgtttgtctatatgttattttccaccatattgccgtcttttggcaatgtgagggcccggaaacctggccctgtcttcttgacgagcattcctaggggtctttcccctctcgccaaaggaatgcaaggtctgttgaatgtcgtgaaggaagcagttcctctggaagcttcttgaagacaaacaacgtctgtagcgaccctttgcaggcagcggaaccccccacctggcgacaggtgcctctgcggccaaaagccacgtgtataagatacacctgcaaaggcggcacaaccccagtgccacgttgtgagttggatagttgtggaaagagtcaaatggctcacctcaagcgtattcaacaaggggctgaaggatgcccagaaggtaccccattgtatgggatctgatctggggcctcggtgcacatgctttacatgtgtttagtcgaggttaaaaaacgtctaggccccccgaaccacggggacgtggttttcctttgaaaaacacgatgataatatggccggtcccgcgacccaaagccccatgaaacttatggccctgcagttgctgctttggcactcggccctctggacagtccaagaagcgactcctctcggacctgcctcatcgttgccgcagtcattccttttgaagtgtctggagcaggtgcgaaagattcagggcgatggagccgcactccaagagaagctctgcgcgacatacaaactttgccatcccgaggagctcgtactgctcgggcacagcttggggattccctgggctcctctctcgtcctgtccgtcgcaggctttgcagttggcagggtgcctttcccagctccactccggtttgttcttgtatcagggactgctgcaagcccttgagggaatctcgccagaattgggcccgacgctggacacgttgcagctcgacgtggcggatttcgcaacaaccatctggcagcagatggaggaactggggatggcacccgcgctgcagcccacgcagggggcaatgccggcctttgcgtccgcgtttcagcgcagggcgggtggagtcctcgtagcgagccaccttcaatcatttttggaagtctcgtaccgggtgctgagacatcttgcgcagccgtgataataggctggagcctcggtggccatgcttcttgccccttgggcctccccccagcccctcctccccttcctgcacccgtacccccgtggtctttgaataaagtctgagtgggcggc

SEQ ID NO: 5007 - DNA, 795 bp, synthetic construct
  misc_feature 1..795: note = Description of Artificial Sequence: Synthetic Transcript Sequence
  source 1..795: mol_type = other DNA
taatacgactcactatagggaaataagagagaaaagaagagtaagaagaaatataagaatggccggtcccgcgacccaaagccccatgaaacttatggccctgcagttgctgctttggcactcggccctctggacagtccaagaagcgactcctctcggacctgcctcatcgttgccgcagtcattccttttgaagtgtctggagcaggtgcgaaagattcagggcgatggagccgcactccaagagaagctctgcgcgacatacaaactttgccatcccgaggagctcgtactgctcgggcacagcttggggattccctgggctcctctctcgtcctgtccgtcgcaggctttgcagttggcagggtgcctttcccagctccactccggtttgttcttgtatcagggactgctgcaagcccttgagggaatctcgccagaattgggcccgacgctggacacgttgcagctcgacgtggcggatttcgcaacaaccatctggcagcagatggaggaactggggatggcacccgcgctgcagcccacgcagggggcaatgccggcctttgcgtccgcgtttcagcgcagggcgggtggagtcctcgtagcgagccaccttcaatcatttttggaagtctcgtaccgggtgctgagacatcttgcgcagccgtgataataggctggagcctcggtggccatgcttcttgccccttgggcctccccccagcccctcctccccttcctgcacccgtacccccgtggtctttgaataaagtctgagtgggcggctctaga

SEQ ID NO: 5008 - RNA, 772 nt, synthetic construct
  misc_feature 1..772: note = Description of Artificial Sequence: Synthetic Transcript Sequence
  source 1..772: mol_type = other RNA
gggaaataagagagaaaagaagagtaagaagaaatataagaatggccggtcccgcgacccaaagccccatgaaacttatggccctgcagttgctgctttggcactcggccctctggacagtccaagaagcgactcctctcggacctgcctcatcgttgccgcagtcattccttttgaagtgtctggagcaggtgcgaaagattcagggcgatggagccgcactccaagagaagctctgcgcgacatacaaactttgccatcccgaggagctcgtactgctcgggcacagcttggggattccctgggctcctctctcgtcctgtccgtcgcaggctttgcagttggcagggtgcctttcccagctccactccggtttgttcttgtatcagggactgctgcaagcccttgagggaatctcgccagaattgggcccgacgctggacacgttgcagctcgacgtggcggatttcgcaacaaccatctggcagcagatggaggaactggggatggcacccgcgctgcagcccacgcagggggcaatgccggcctttgcgtccgcgtttcagcgcagggcgggtggagtcctcgtagcgagccaccttcaatcatttttggaagtctcgtaccgggtgctgagacatcttgcgcagccgtgataataggctggagcctcggtggccatgcttcttgccccttgggcctccccccagcccctcctccccttcctgcacccgtacccccgtggtctttgaataaagtctgagtgggcggc

SEQ ID NO: 5009 - DNA, 1518 bp, synthetic construct
  misc_feature 1..1518: note = Description of Artificial Sequence: Synthetic Transcript Sequence
  source 1..1518: mol_type = other DNA
taatacgactcactatagggaaataagagagaaaagaagagtaagaagaaatataagagccacctcgtgaggatctatttccggtgaattcctcgagactagttctagagcggccgcggatcccgcccctctccctcccccccccctaacgttactggccgaagccgcttggaataaggccggtgtgcgtttgtctatatgttattttccaccatattgccgtcttttggcaatgtgagggcccggaaacctggccctgtcttcttgacgagcattcctaggggtctttcccctctcgccaaaggaatgcaaggtctgttgaatgtcgtgaaggaagcagttcctctggaagcttcttgaagacaaacaacgtctgtagcgaccctttgcaggcagcggaaccccccacctggcgacaggtgcctctgcggccaaaagccacgtgtataagatacacctgcaaaggcggcacaaccccagtgccacgttgtgagttggatagttgtggaaagagtcaaatggctcacctcaagcgtattcaacaaggggctgaaggatgcccagaaggtaccccattgtatgggatctgatctggggcctcggtgcacatgctttacatgtgtttagtcgaggttaaaaaacgtctaggccccccgaaccacggggacgtggttttcctttgaaaaacacgatgataatatggccggtcccgcgacccaaagccccatgaaacttatggccctgcagttgctgctttggcactcggccctctggacagtccaagaagcgactcctctcggacctgcctcatcgttgccgcagtcattccttttgaagtgtctggagcaggtgcgaaagattcagggcgatggagccgcactccaagagaagctctgcgcgacatacaaactttgccatcccgaggagctcgtactgctcgggcacagcttggggattccctgggctcctctctcgtcctgtccgtcgcaggctttgcagttggcagggtgcctttcccagctccactccggtttgttcttgtatcagggactgctgcaagcccttgagggaatctcgccagaattgggcccgacgctggacacgttgcagctcgacgtggcggatttcgcaacaaccatctggcagcagatggaggaactggggatggcacccgcgctgcagcccacgcagggggcaatgccggcctttgcgtccgcgtttcagcgcagggcgggtggagtcctcgtagcgagccaccttcaatcatttttggaagtctcgtaccgggtgctgagacatcttgcgcagccgtgataataggctggagcctcggtggccatgcttcttgccccttgggcctccccccagcccctcctccccttcctgcacccgtacccccgtggtctttgaataaagtctgagtgggcggcaaaaaaaaaaaaaaaaaaaaaaaaaaaaaaaaaaaaaaaaaaaaaaaaaaaaaaaaaaaaaaaaaaaaaaaaaaaaaaaaggcgcgcc

SEQ ID NO: 5010 - RNA, 1493 nt, synthetic construct
  misc_feature 1..1493: note = Description of Artificial Sequence: Synthetic Transcript Sequence
  source 1..1493: mol_type = other RNA
gggaaataagagagaaaagaagagtaagaagaaatataagagccacctcgtgaggatctatttccggtgaattcctcgagactagttctagagcggccgcggatcccgcccctctccctcccccccccctaacgttactggccgaagccgcttggaataaggccggtgtgcgtttgtctatatgttattttccaccatattgccgtcttttggcaatgtgagggcccggaaacctggccctgtcttcttgacgagcattcctaggggtctttcccctctcgccaaaggaatgcaaggtctgttgaatgtcgtgaaggaagcagttcctctggaagcttcttgaagacaaacaacgtctgtagcgaccctttgcaggcagcggaaccccccacctggcgacaggtgcctctgcggccaaaagccacgtgtataagatacacctgcaaaggcggcacaaccccagtgccacgttgtgagttggatagttgtggaaagagtcaaatggctcacctcaagcgtattcaacaaggggctgaaggatgcccagaaggtaccccattgtatgggatctgatctggggcctcggtgcacatgctttacatgtgtttagtcgaggttaaaaaacgtctaggccccccgaaccacggggacgtggttttcctttgaaaaacacgatgataatatggccggtcccgcgacccaaagccccatgaaacttatggccctgcagttgctgctttggcactcggccctctggacagtccaagaagcgactcctctcggacctgcctcatcgttgccgcagtcattccttttgaagtgtctggagcaggtgcgaaagattcagggcgatggagccgcactccaagagaagctctgcgcgacatacaaactttgccatcccgaggagctcgtactgctcgggcacagcttggggattccctgggctcctctctcgtcctgtccgtcgcaggctttgcagttggcagggtgcctttcccagctccactccggtttgttcttgtatcagggactgctgcaagcccttgagggaatctcgccagaattgggcccgacgctggacacgttgcagctcgacgtggcggatttcgcaacaaccatctggcagcagatggaggaactggggatggcacccgcgctgcagcccacgcagggggcaatgccggcctttgcgtccgcgtttcagcgcagggcgggtggagtcctcgtagcgagccaccttcaatcatttttggaagtctcgtaccgggtgctgagacatcttgcgcagccgtgataataggctggagcctcggtggccatgcttcttgccccttgggcctccccccagcccctcctccccttcctgcacccgtacccccgtggtctttgaataaagtctgagtgggcggcaaaaaaaaaaaaaaaaaaaaaaaaaaaaaaaaaaaaaaaaaaaaaaaaaaaaaaaaaaaaaaaaaaaaaaaaaaaaaaaa

SEQ ID NO: 5011 - DNA, 1512 bp, synthetic construct
  misc_feature 1..1512: note = Description of Artificial Sequence: Synthetic Transcript Sequence
  source 1..1512: mol_type = other DNA
taatacgactcactatagggaaataagagagaaaagaagagtaagaagaaatataagatcgtgaggatctatttccggtgaattcctcgagactagttctagagcggccgcggatcccgcccctctccctcccccccccctaacgttactggccgaagccgcttggaataaggccggtgtgcgtttgtctatatgttattttccaccatattgccgtcttttggcaatgtgagggcccggaaacctggccctgtcttcttgacgagcattcctaggggtctttcccctctcgccaaaggaatgcaaggtctgttgaatgtcgtgaaggaagcagttcctctggaagcttcttgaagacaaacaacgtctgtagcgaccctttgcaggcagcggaaccccccacctggcgacaggtgcctctgcggccaaaagccacgtgtataagatacacctgcaaaggcggcacaaccccagtgccacgttgtgagttggatagttgtggaaagagtcaaatggctcacctcaagcgtattcaacaaggggctgaaggatgcccagaaggtaccccattgtatgggatctgatctggggcctcggtgcacatgctttacatgtgtttagtcgaggttaaaaaacgtctaggccccccgaaccacggggacgtggttttcctttgaaaaacacgatgataatatggccggtcccgcgacccaaagccccatgaaacttatggccctgcagttgctgctttggcactcggccctctggacagtccaagaagcgactcctctcggacctgcctcatcgttgccgcagtcattccttttgaagtgtctggagcaggtgcgaaagattcagggcgatggagccgcactccaagagaagctctgcgcgacatacaaactttgccatcccgaggagctcgtactgctcgggcacagcttggggattccctgggctcctctctcgtcctgtccgtcgcaggctttgcagttggcagggtgcctttcccagctccactccggtttgttcttgtatcagggactgctgcaagcccttgagggaatctcgccagaattgggcccgacgctggacacgttgcagctcgacgtggcggatttcgcaacaaccatctggcagcagatggaggaactggggatggcacccgcgctgcagcccacgcagggggcaatgccggcctttgcgtccgcgtttcagcgcagggcgggtggagtcctcgtagcgagccaccttcaatcatttttggaagtctcgtaccgggtgctgagacatcttgcgcagccgtgataataggctggagcctcggtggccatgcttcttgccccttgggcctccccccagcccctcctccccttcctgcacccgtacccccgtggtctttgaataaagtctgagtgggcggcaaaaaaaaaaaaaaaaaaaaaaaaaaaaaaaaaaaaaaaaaaaaaaaaaaaaaaaaaaaaaaaaaaaaaaaaaaaaaaaaggcgcgcc

SEQ ID NO: 5012 - RNA, 1487 nt, synthetic construct
  misc_feature 1..1487: note = Description of Artificial Sequence: Synthetic Transcript Sequence
  source 1..1487: mol_type = other RNA
gggaaataagagagaaaagaagagtaagaagaaatataagatcgtgaggatctatttccggtgaattcctcgagactagttctagagcggccgcggatcccgcccctctccctcccccccccctaacgttactggccgaagccgcttggaataaggccggtgtgcgtttgtctatatgttattttccaccatattgccgtcttttggcaatgtgagggcccggaaacctggccctgtcttcttgacgagcattcctaggggtctttcccctctcgccaaaggaatgcaaggtctgttgaatgtcgtgaaggaagcagttcctctggaagcttcttgaagacaaacaacgtctgtagcgaccctttgcaggcagcggaaccccccacctggcgacaggtgcctctgcggccaaaagccacgtgtataagatacacctgcaaaggcggcacaaccccagtgccacgttgtgagttggatagttgtggaaagagtcaaatggctcacctcaagcgtattcaacaaggggctgaaggatgcccagaaggtaccccattgtatgggatctgatctggggcctcggtgcacatgctttacatgtgtttagtcgaggttaaaaaacgtctaggccccccgaaccacggggacgtggttttcctttgaaaaacacgatgataatatggccggtcccgcgacccaaagccccatgaaacttatggccctgcagttgctgctttggcactcggccctctggacagtccaagaagcgactcctctcggacctgcctcatcgttgccgcagtcattccttttgaagtgtctggagcaggtgcgaaagattcagggcgatggagccgcactccaagagaagctctgcgcgacatacaaactttgccatcccgaggagctcgtactgctcgggcacagcttggggattccctgggctcctctctcgtcctgtccgtcgcaggctttgcagttggcagggtgcctttcccagctccactccggtttgttcttgtatcagggactgctgcaagcccttgagggaatctcgccagaattgggcccgacgctggacacgttgcagctcgacgtggcggatttcgcaacaaccatctggcagcagatggaggaactggggatggcacccgcgctgcagcccacgcagggggcaatgccggcctttgcgtccgcgtttcagcgcagggcgggtggagtcctcgtagcgagccaccttcaatcatttttggaagtctcgtaccgggtgctgagacatcttgcgcagccgtgataataggctggagcctcggtggccatgcttcttgccccttgggcctccccccagcccctcctccccttcctgcacccgtacccccgtggtctttgaataaagtctgagtgggcggcaaaaaaaaaaaaaaaaaaaaaaaaaaaaaaaaaaaaaaaaaaaaaaaaaaaaaaaaaaaaaaaaaaaaaaaaaaaaaaaa

SEQ ID NO: 5013 - DNA, 883 bp, synthetic construct
  misc_feature 1..883: note = Description of Artificial Sequence: Synthetic Transcript Sequence
  source 1..883: mol_type = other DNA
taatacgactcactatagggaaataagagagaaaagaagagtaagaagaaatataagagccaccatggccggtcccgcgacccaaagccccatgaaacttatggccctgcagttgctgctttggcactcggccctctggacagtccaagaagcgactcctctcggacctgcctcatcgttgccgcagtcattccttttgaagtgtctggagcaggtgcgaaagattcagggcgatggagccgcactccaagagaagctctgcgcgacatacaaactttgccatcccgaggagctcgtactgctcgggcacagcttggggattccctgggctcctctctcgtcctgtccgtcgcaggctttgcagttggcagggtgcctttcccagctccactccggtttgttcttgtatcagggactgctgcaagcccttgagggaatctcgccagaattgggcccgacgctggacacgttgcagctcgacgtggcggatttcgcaacaaccatctggcagcagatggaggaactggggatggcacccgcgctgcagcccacgcagggggcaatgccggcctttgcgtccgcgtttcagcgcagggcgggtggagtcctcgtagcgagccaccttcaatcatttttggaagtctcgtaccgggtgctgagacatcttgcgcagccgtgataataggctggagcctcggtggccatgcttcttgccccttgggcctccccccagcccctcctccccttcctgcacccgtacccccgtggtctttgaataaagtctgagtgggcggcaaaaaaaaaaaaaaaaaaaaaaaaaaaaaaaaaaaaaaaaaaaaaaaaaaaaaaaaaaaaaaaaaaaaaaaaaaaaaaaaggcgcgcc

SEQ ID NO: 5014 - RNA, 858 nt, synthetic construct
  misc_feature 1..858: note = Description of Artificial Sequence: Synthetic Transcript Sequence
  source 1..858: mol_type = other RNA
gggaaataagagagaaaagaagagtaagaagaaatataagagccaccatggccggtcccgcgacccaaagccccatgaaacttatggccctgcagttgctgctttggcactcggccctctggacagtccaagaagcgactcctctcggacctgcctcatcgttgccgcagtcattccttttgaagtgtctggagcaggtgcgaaagattcagggcgatggagccgcactccaagagaagctctgcgcgacatacaaactttgccatcccgaggagctcgtactgctcgggcacagcttggggattccctgggctcctctctcgtcctgtccgtcgcaggctttgcagttggcagggtgcctttcccagctccactccggtttgttcttgtatcagggactgctgcaagcccttgagggaatctcgccagaattgggcccgacgctggacacgttgcagctcgacgtggcggatttcgcaacaaccatctggcagcagatggaggaactggggatggcacccgcgctgcagcccacgcagggggcaatgccggcctttgcgtccgcgtttcagcgcagggcgggtggagtcctcgtagcgagccaccttcaatcatttttggaagtctcgtaccgggtgctgagacatcttgcgcagccgtgataataggctggagcctcggtggccatgcttcttgccccttgggcctccccccagcccctcctccccttcctgcacccgtacccccgtggtctttgaataaagtctgagtgggcggcaaaaaaaaaaaaaaaaaaaaaaaaaaaaaaaaaaaaaaaaaaaaaaaaaaaaaaaaaaaaaaaaaaaaaaaaaaaaaaaa

SEQ ID NO: 5015 - DNA, 877 bp, synthetic construct
  misc_feature 1..877: note = Description of Artificial Sequence: Synthetic Transcript Sequence
  source 1..877: mol_type = other DNA
taatacgactcactatagggaaataagagagaaaagaagagtaagaagaaatataagaatggccggtcccgcgacccaaagccccatgaaacttatggccctgcagttgctgctttggcactcggccctctggacagtccaagaagcgactcctctcggacctgcctcatcgttgccgcagtcattccttttgaagtgtctggagcaggtgcgaaagattcagggcgatggagccgcactccaagagaagctctgcgcgacatacaaactttgccatcccgaggagctcgtactgctcgggcacagcttggggattccctgggctcctctctcgtcctgtccgtcgcaggctttgcagttggcagggtgcctttcccagctccactccggtttgttcttgtatcagggactgctgcaagcccttgagggaatctcgccagaattgggcccgacgctggacacgttgcagctcgacgtggcggatttcgcaacaaccatctggcagcagatggaggaactggggatggcacccgcgctgcagcccacgcagggggcaatgccggcctttgcgtccgcgtttcagcgcagggcgggtggagtcctcgtagcgagccaccttcaatcatttttggaagtctcgtaccgggtgctgagacatcttgcgcagccgtgataataggctggagcctcggtggccatgcttcttgccccttgggcctccccccagcccctcctccccttcctgcacccgtacccccgtggtctttgaataaagtctgagtgggcggcaaaaaaaaaaaaaaaaaaaaaaaaaaaaaaaaaaaaaaaaaaaaaaaaaaaaaaaaaaaaaaaaaaaaaaaaaaaaaaaaggcgcgcc

SEQ ID NO: 5016 - RNA, 852 nt, synthetic construct
  misc_feature 1..852: note = Description of Artificial Sequence: Synthetic Transcript Sequence
  source 1..852: mol_type = other RNA
gggaaataagagagaaaagaagagtaagaagaaatataagaatggccggtcccgcgacccaaagccccatgaaacttatggccctgcagttgctgctttggcactcggccctctggacagtccaagaagcgactcctctcggacctgcctcatcgttgccgcagtcattccttttgaagtgtctggagcaggtgcgaaagattcagggcgatggagccgcactccaagagaagctctgcgcgacatacaaactttgccatcccgaggagctcgtactgctcgggcacagcttggggattccctgggctcctctctcgtcctgtccgtcgcaggctttgcagttggcagggtgcctttcccagctccactccggtttgttcttgtatcagggactgctgcaagcccttgagggaatctcgccagaattgggcccgacgctggacacgttgcagctcgacgtggcggatttcgcaacaaccatctggcagcagatggaggaactggggatggcacccgcgctgcagcccacgcagggggcaatgccggcctttgcgtccgcgtttcagcgcagggcgggtggagtcctcgtagcgagccaccttcaatcatttttggaagtctcgtaccgggtgctgagacatcttgcgcagccgtgataataggctggagcctcggtggccatgcttcttgccccttgggcctccccccagcccctcctccccttcctgcacccgtacccccgtggtctttgaataaagtctgagtgggcggcaaaaaaaaaaaaaaaaaaaaaaaaaaaaaaaaaaaaaaaaaaaaaaaaaaaaaaaaaaaaaaaaaaaaaaaaaaaaaaaa

SEQ ID NO: 5017 - DNA, 823 bp, synthetic construct
  misc_feature 1..823: note = Description of Artificial Sequence: Synthetic Transcript Sequence
  source 1..823: mol_type = other DNA
taatacgactcactatagggaaataagagagaaaagaagagtaagaagaaatataagagccaccatggccggtcccgcgacccaaagccccatgaaacttatggccctgcagttgctgctttggcactcggccctctggacagtccaagaagcgactcctctcggacctgcctcatcgttgccgcagtcattccttttgaagtgtctggagcaggtgcgaaagattcagggcgatggagccgcactccaagagaagctctgcgcgacatacaaactttgccatcccgaggagctcgtactgctcgggcacagcttggggattccctgggctcctctctcgtcctgtccgtcgcaggctttgcagttggcagggtgcctttcccagctccactccggtttgttcttgtatcagggactgctgcaagcccttgagggaatctcgccagaattgggcccgacgctggacacgttgcagctcgacgtggcggatttcgcaacaaccatctggcagcagatggaggaactggggatggcacccgcgctgcagcccacgcagggggcaatgccggcctttgcgtccgcgtttcagcgcagggcgggtggagtcctcgtagcgagccaccttcaatcatttttggaagtctcgtaccgggtgctgagacatcttgcgcagccgtgataataggctggagcctcggtggccatgcttcttgccccttgggcctccccccagcccctcctccccttcctgcacccgtaccccccaaacaccattgtcacactccagtggtctttgaataaagtctgagtgggcggctctaga

SEQ ID NO: 5018 - RNA, 800 nt, synthetic construct
  misc_feature 1..800: note = Description of Artificial Sequence: Synthetic Transcript Sequence
  source 1..800: mol_type = other RNA
gggaaataagagagaaaagaagagtaagaagaaatataagagccaccatggccggtcccgcgacccaaagccccatgaaacttatggccctgcagttgctgctttggcactcggccctctggacagtccaagaagcgactcctctcggacctgcctcatcgttgccgcagtcattccttttgaagtgtctggagcaggtgcgaaagattcagggcgatggagccgcactccaagagaagctctgcgcgacatacaaactttgccatcccgaggagctcgtactgctcgggcacagcttggggattccctgggctcctctctcgtcctgtccgtcgcaggctttgcagttggcagggtgcctttcccagctccactccggtttgttcttgtatcagggactgctgcaagcccttgagggaatctcgccagaattgggcccgacgctggacacgttgcagctcgacgtggcggatttcgcaacaaccatctggcagcagatggaggaactggggatggcacccgcgctgcagcccacgcagggggcaatgccggcctttgcgtccgcgtttcagcgcagggcgggtggagtcctcgtagcgagccaccttcaatcatttttggaagtctcgtaccgggtgctgagacatcttgcgcagccgtgataataggctggagcctcggtggccatgcttcttgccccttgggcctccccccagcccctcctccccttcctgcacccgtaccccccaaacaccattgtcacactccagtggtctttgaataaagtctgagtgggcggc

SEQ ID NO: 5019 - DNA, 808 bp, synthetic construct
  misc_feature 1..808: note = Description of Artificial Sequence: Synthetic Transcript Sequence
  source 1..808: mol_type = other DNA
taatacgactcactatagggaaataagagagaaaagaagagtaagaagaaatataagagccaccatggccggtcccgcgacccaaagccccatgaaacttatggccctgcagttgctgctttggcactcggccctctggacagtccaagaagcgactcctctcggacctgcctcatcgttgccgcagtcattccttttgaagtgtctggagcaggtgcgaaagattcagggcgatggagccgcactccaagagaagctctgcgcgacatacaaactttgccatcccgaggagctcgtactgctcgggcacagcttggggattccctgggctcctctctcgtcctgtccgtcgcaggctttgcagttggcagggtgcctttcccagctccactccggtttgttcttgtatcagggactgctgcaagcccttgagggaatctcgccagaattgggcccgacgctggacacgttgcagctcgacgtggcggatttcgcaacaaccatctggcagcagatggaggaactggggatggcacccgcgctgcagcccacgcagggggcaatgccggcctttgcgtccgcgtttcagcgcagggcgggtggagtcctcgtagcgagccaccttcaatcatttttggaagtctcgtaccgggtgctgagacatcttgcgcagccgtgataataggctggagcctcggtggccatgcttcttgccccttgggcctccccccagcccctcctccccttcctgcacccgtacccccacactccgtggtctttgaataaagtctgagtgggcggctctaga

SEQ ID NO: 5020 - RNA, 785 nt, synthetic construct
  misc_feature 1..785: note = Description of Artificial Sequence: Synthetic Transcript Sequence
  source 1..785: mol_type = other RNA
gggaaataagagagaaaagaagagtaagaagaaatataagagccaccatggccggtcccgcgacccaaagccccatgaaacttatggccctgcagttgctgctttggcactcggccctctggacagtccaagaagcgactcctctcggacctgcctcatcgttgccgcagtcattccttttgaagtgtctggagcaggtgcgaaagattcagggcgatggagccgcactccaagagaagctctgcgcgacatacaaactttgccatcccgaggagctcgtactgctcgggcacagcttggggattccctgggctcctctctcgtcctgtccgtcgcaggctttgcagttggcagggtgcctttcccagctccactccggtttgttcttgtatcagggactgctgcaagcccttgagggaatctcgccagaattgggcccgacgctggacacgttgcagctcgacgtggcggatttcgcaacaaccatctggcagcagatggaggaactggggatggcacccgcgctgcagcccacgcagggggcaatgccggcctttgcgtccgcgtttcagcgcagggcgggtggagtcctcgtagcgagccaccttcaatcatttttggaagtctcgtaccgggtgctgagacatcttgcgcagccgtgataataggctggagcctcggtggccatgcttcttgccccttgggcctccccccagcccctcctccccttcctgcacccgtacccccacactccgtggtctttgaataaagtctgagtgggcggc

SEQ ID NO: 5021 - DNA, 816 bp, synthetic construct
  misc_feature 1..816: note = Description of Artificial Sequence: Synthetic Transcript Sequence
  source 1..816: mol_type = other DNA
taatacgactcactatagggaaataagagagaaaagaagagtaagaagaaatataagagccaccatggccggtcccgcgacccaaagccccatgaaacttatggccctgcagttgctgctttggcactcggccctctggacagtccaagaagcgactcctctcggacctgcctcatcgttgccgcagtcattccttttgaagtgtctggagcaggtgcgaaagattcagggcgatggagccgcactccaagagaagctctgcgcgacatacaaactttgccatcccgaggagctcgtactgctcgggcacagcttggggattccctgggctcctctctcgtcctgtccgtcgcaggctttgcagttggcagggtgcctttcccagctccactccggtttgttcttgtatcagggactgctgcaagcccttgagggaatctcgccagaattgggcccgacgctggacacgttgcagctcgacgtggcggatttcgcaacaaccatctggcagcagatggaggaactggggatggcacccgcgctgcagcccacgcagggggcaatgccggcctttgcgtccgcgtttcagcgcagggcgggtggagtcctcgtagcgagccaccttcaatcatttttggaagtctcgtaccgggtgctgagacatcttgcgcagccgtgataataggctggagcctcggtggccatgcttcttgccccttgggcctccccccagcccctcctccccttcctgcacccgtaccccccaaacaccattgtcagtggtctttgaataaagtctgagtgggcggctctaga

SEQ ID NO: 5022 - RNA, 793 nt, synthetic construct
  misc_feature 1..793: note = Description of Artificial Sequence: Synthetic Transcript Sequence
  source 1..793: mol_type = other RNA
gggaaataagagagaaaagaagagtaagaagaaatataagagccaccatggccggtcccgcgacccaaagccccatgaaacttatggccctgcagttgctgctttggcactcggccctctggacagtccaagaagcgactcctctcggacctgcctcatcgttgccgcagtcattccttttgaagtgtctggagcaggtgcgaaagattcagggcgatggagccgcactccaagagaagctctgcgcgacatacaaactttgccatcccgaggagctcgtactgctcgggcacagcttggggattccctgggctcctctctcgtcctgtccgtcgcaggctttgcagttggcagggtgcctttcccagctccactccggtttgttcttgtatcagggactgctgcaagcccttgagggaatctcgccagaattgggcccgacgctggacacgttgcagctcgacgtggcggatttcgcaacaaccatctggcagcagatggaggaactggggatggcacccgcgctgcagcccacgcagggggcaatgccggcctttgcgtccgcgtttcagcgcagggcgggtggagtcctcgtagcgagccaccttcaatcatttttggaagtctcgtaccgggtgctgagacatcttgcgcagccgtgataataggctggagcctcggtggccatgcttcttgccccttgggcctccccccagcccctcctccccttcctgcacccgtaccccccaaacaccattgtcagtggtctttgaataaagtctgagtgggcggc

SEQ ID NO: 5023 - DNA, 825 bp, synthetic construct
  misc_feature 1..825: note = Description of Artificial Sequence: Synthetic Transcript Sequence
  source 1..825: mol_type = other DNA
taatacgactcactatagggaaataagagagaaaagaagagtaagaagaaatataagagccaccatggccggtcccgcgacccaaagccccatgaaacttatggccctgcagttgctgctttggcactcggccctctggacagtccaagaagcgactcctctcggacctgcctcatcgttgccgcagtcattccttttgaagtgtctggagcaggtgcgaaagattcagggcgatggagccgcactccaagagaagctctgcgcgacatacaaactttgccatcccgaggagctcgtactgctcgggcacagcttggggattccctgggctcctctctcgtcctgtccgtcgcaggctttgcagttggcagggtgcctttcccagctccactccggtttgttcttgtatcagggactgctgcaagcccttgagggaatctcgccagaattgggcccgacgctggacacgttgcagctcgacgtggcggatttcgcaacaaccatctggcagcagatggaggaactggggatggcacccgcgctgcagcccacgcagggggcaatgccggcctttgcgtccgcgtttcagcgcagggcgggtggagtcctcgtagcgagccaccttcaatcatttttggaagtctcgtaccgggtgctgagacatcttgcgcagccgtgataataggctgccttctgcggggcttgccttctggccatgcccttcttctctcccttgcacctgtacctctcaaacaccattgtcacactccatggtctttgaataaagcctgagtaggaaggcggccgctcgagcatgcatctaga

SEQ ID NO: 5024 - RNA, 783 nt, synthetic construct
  misc_feature 1..783: note = Description of Artificial Sequence: Synthetic Transcript Sequence
  source 1..783: mol_type = other RNA
gggaaataagagagaaaagaagagtaagaagaaatataagagccaccatggccggtcccgcgacccaaagccccatgaaacttatggccctgcagttgctgctttggcactcggccctctggacagtccaagaagcgactcctctcggacctgcctcatcgttgccgcagtcattccttttgaagtgtctggagcaggtgcgaaagattcagggcgatggagccgcactccaagagaagctctgcgcgacatacaaactttgccatcccgaggagctcgtactgctcgggcacagcttggggattccctgggctcctctctcgtcctgtccgtcgcaggctttgcagttggcagggtgcctttcccagctccactccggtttgttcttgtatcagggactgctgcaagcccttgagggaatctcgccagaattgggcccgacgctggacacgttgcagctcgacgtggcggatttcgcaacaaccatctggcagcagatggaggaactggggatggcacccgcgctgcagcccacgcagggggcaatgccggcctttgcgtccgcgtttcagcgcagggcgggtggagtcctcgtagcgagccaccttcaatcatttttggaagtctcgtaccgggtgctgagacatcttgcgcagccgtgataataggctgccttctgcggggcttgccttctggccatgcccttcttctctcccttgcacctgtacctctcaaacaccattgtcacactccatggtctttgaataaagcctgagtaggaag

SEQ ID NO: 5025 - DNA, 810 bp, synthetic construct
  misc_feature 1..810: note = Description of Artificial Sequence: Synthetic Transcript Sequence
  source 1..810: mol_type = other DNA
taatacgactcactatagggaaataagagagaaaagaagagtaagaagaaatataagagccaccatggccggtcccgcgacccaaagccccatgaaacttatggccctgcagttgctgctttggcactcggccctctggacagtccaagaagcgactcctctcggacctgcctcatcgttgccgcagtcattccttttgaagtgtctggagcaggtgcgaaagattcagggcgatggagccgcactccaagagaagctctgcgcgacatacaaactttgccatcccgaggagctcgtactgctcgggcacagcttggggattccctgggctcctctctcgtcctgtccgtcgcaggctttgcagttggcagggtgcctttcccagctccactccggtttgttcttgtatcagggactgctgcaagcccttgagggaatctcgccagaattgggcccgacgctggacacgttgcagctcgacgtggcggatttcgcaacaaccatctggcagcagatggaggaactggggatggcacccgcgctgcagcccacgcagggggcaatgccggcctttgcgtccgcgtttcagcgcagggcgggtggagtcctcgtagcgagccaccttcaatcatttttggaagtctcgtaccgggtgctgagacatcttgcgcagccgtgataataggctgccttctgcggggcttgccttctggccatgcccttcttctctcccttgcacctgtacctctacactcctggtctttgaataaagcctgagtaggaaggcggccgctcgagcatgcatctaga

SEQ ID NO: 5026 - RNA, 768 nt, synthetic construct
  misc_feature 1..768: note = Description of Artificial Sequence: Synthetic Transcript Sequence
  source 1..768: mol_type = other RNA
gggaaataagagagaaaagaagagtaagaagaaatataagagccaccatggccggtcccgcgacccaaagccccatgaaacttatggccctgcagttgctgctttggcactcggccctctggacagtccaagaagcgactcctctcggacctgcctcatcgttgccgcagtcattccttttgaagtgtctggagcaggtgcgaaagattcagggcgatggagccgcactccaagagaagctctgcgcgacatacaaactttgccatcccgaggagctcgtactgctcgggcacagcttggggattccctgggctcctctctcgtcctgtccgtcgcaggctttgcagttggcagggtgcctttcccagctccactccggtttgttcttgtatcagggactgctgcaagcccttgagggaatctcgccagaattgggcccgacgctggacacgttgcagctcgacgtggcggatttcgcaacaaccatctggcagcagatggaggaactggggatggcacccgcgctgcagcccacgcagggggcaatgccggcctttgcgtccgcgtttcagcgcagggcgggtggagtcctcgtagcgagccaccttcaatcatttttggaagtctcgtaccgggtgctgagacatcttgcgcagccgtgataataggctgccttctgcggggcttgccttctggccatgcccttcttctctcccttgcacctgtacctctacactcctggtctttgaataaagcctgagtaggaag

SEQ ID NO: 5027 - DNA, 818 bp, synthetic construct
  misc_feature 1..818: note = Description of Artificial Sequence: Synthetic Transcript Sequence
  source 1..818: mol_type = other DNA
taatacgactcactatagggaaataagagagaaaagaagagtaagaagaaatataagagccaccatggccggtcccgcgacccaaagccccatgaaacttatggccctgcagttgctgctttggcactcggccctctggacagtccaagaagcgactcctctcggacctgcctcatcgttgccgcagtcattccttttgaagtgtctggagcaggtgcgaaagattcagggcgatggagccgcactccaagagaagctctgcgcgacatacaaactttgccatcccgaggagctcgtactgctcgggcacagcttggggattccctgggctcctctctcgtcctgtccgtcgcaggctttgcagttggcagggtgcctttcccagctccactccggtttgttcttgtatcagggactgctgcaagcccttgagggaatctcgccagaattgggcccgacgctggacacgttgcagctcgacgtggcggatttcgcaacaaccatctggcagcagatggaggaactggggatggcacccgcgctgcagcccacgcagggggcaatgccggcctttgcgtccgcgtttcagcgcagggcgggtggagtcctcgtagcgagccaccttcaatcatttttggaagtctcgtaccgggtgctgagacatcttgcgcagccgtgataataggctgccttctgcggggcttgccttctggccatgcccttcttctctcccttgcacctgtacctctcaaacaccattgtcatggtctttgaataaagcctgagtaggaaggcggccgctcgagcatgcatctaga

SEQ ID NO: 5028 - RNA, 776 nt, synthetic construct
  misc_feature 1..776: note = Description of Artificial Sequence: Synthetic Transcript Sequence
  source 1..776: mol_type = other RNA
gggaaataagagagaaaagaagagtaagaagaaatataagagccaccatggccggtcccgcgacccaaagccccatgaaacttatggccctgcagttgctgctttggcactcggccctctggacagtccaagaagcgactcctctcggacctgcctcatcgttgccgcagtcattccttttgaagtgtctggagcaggtgcgaaagattcagggcgatggagccgcactccaagagaagctctgcgcgacatacaaactttgccatcccgaggagctcgtactgctcgggcacagcttggggattccctgggctcctctctcgtcctgtccgtcgcaggctttgcagttggcagggtgcctttcccagctccactccggtttgttcttgtatcagggactgctgcaagcccttgagggaatctcgccagaattgggcccgacgctggacacgttgcagctcgacgtggcggatttcgcaacaaccatctggcagcagatggaggaactggggatggcacccgcgctgcagcccacgcagggggcaatgccggcctttgcgtccgcgtttcagcgcagggcgggtggagtcctcgtagcgagccaccttcaatcatttttggaagtctcgtaccgggtgctgagacatcttgcgcagccgtgataataggctgccttctgcggggcttgccttctggccatgcccttcttctctcccttgcacctgtacctctcaaacaccattgtcatggtctttgaataaagcctgagtaggaag

SEQ ID NO: 5029 - DNA, 1594 bp, synthetic construct
  misc_feature 1..1594: note = Description of Artificial Sequence: Synthetic Transcript Sequence
  source 1..1594: mol_type = other DNA
taatacgactcactatagggaaataagagagaaaagaagagtaagaagaaatataagagccaccatgcagcgcgtcaacatgattatggccgaatcgccgggactcatcacaatctgcctcttgggttatctcttgtcggcagaatgtaccgtgttcttggatcacgaaaacgcgaacaaaattcttaatcgcccgaagcggtataactccgggaaacttgaggagtttgtgcagggcaatcttgaacgagagtgcatggaggagaaatgctcctttgaggaggcgagggaagtgtttgaaaacacagagcgaacaacggagttttggaagcaatacgtagatggggaccagtgtgagtcgaatccgtgcctcaatgggggatcatgtaaagatgacatcaatagctatgaatgctggtgcccgtttgggtttgaagggaagaactgtgagctggatgtgacgtgcaacatcaaaaacggacgctgtgagcagttttgtaagaactcggctgacaataaggtagtatgctcgtgcacagagggataccggctggcggagaaccaaaaatcgtgcgagcccgcagtcccgttcccttgtgggagggtgagcgtgtcacagactagcaagttgacgagagcggagactgtattccccgacgtggactacgtcaacagcaccgaagccgaaacaatcctcgataacatcacgcagagcactcagtccttcaatgactttacgagggtcgtaggtggtgaggacgcgaaacccggtcagttcccctggcaggtggtattgaacggaaaagtcgatgccttttgtggaggttccattgtcaacgagaagtggattgtcacagcggcacactgcgtagaaacaggagtgaaaatcacggtagtggcgggagagcataacattgaagagacagagcacacggaacaaaagcgaaatgtcatcagaatcattccacaccataactataacgcggcaatcaataagtacaatcacgacatcgcacttttggagcttgacgaacctttggtgcttaattcgtacgtcacccctatttgtattgccgacaaagagtatacaaacatcttcttgaaattcggctccgggtacgtatcgggctggggcagagtgttccataagggtagatccgcactggtgttgcaatacctcagggtgcccctcgtggatcgagccacttgtctgcggtccaccaaattcacaatctacaacaatatgttctgtgcgggattccatgaaggtgggagagatagctgccagggagactcagggggtccccacgtgacggaagtcgaggggacgtcatttctgacgggaattatctcatggggagaggaatgtgcgatgaaggggaaatatggcatctacactaaagtgtcacggtatgtcaattggatcaaggaaaagacgaaactcacgtgataataggctggagcctcggtggccatgcttcttgccccttgggcctccccccagcccctcctccccttcctgcacccgtaccccccaaacaccattgtcacactccagtggtctttgaataaagtctgagtgggcggctctaga

SEQ ID NO: 5030 - RNA, 1571 nt, synthetic construct
  misc_feature 1..1571: note = Description of Artificial Sequence: Synthetic Transcript Sequence
  source 1..1571: mol_type = other RNA
gggaaataagagagaaaagaagagtaagaagaaatataagagccaccatgcagcgcgtcaacatgattatggccgaatcgccgggactcatcacaatctgcctcttgggttatctcttgtcggcagaatgtaccgtgttcttggatcacgaaaacgcgaacaaaattcttaatcgcccgaagcggtataactccgggaaacttgaggagtttgtgcagggcaatcttgaacgagagtgcatggaggagaaatgctcctttgaggaggcgagggaagtgtttgaaaacacagagcgaacaacggagttttggaagcaatacgtagatggggaccagtgtgagtcgaatccgtgcctcaatgggggatcatgtaaagatgacatcaatagctatgaatgctggtgcccgtttgggtttgaagggaagaactgtgagctggatgtgacgtgcaacatcaaaaacggacgctgtgagcagttttgtaagaactcggctgacaataaggtagtatgctcgtgcacagagggataccggctggcggagaaccaaaaatcgtgcgagcccgcagtcccgttcccttgtgggagggtgagcgtgtcacagactagcaagttgacgagagcggagactgtattccccgacgtggactacgtcaacagcaccgaagccgaaacaatcctcgataacatcacgcagagcactcagtccttcaatgactttacgagggtcgtaggtggtgaggacgcgaaacccggtcagttcccctggcaggtggtattgaacggaaaagtcgatgccttttgtggaggttccattgtcaacgagaagtggattgtcacagcggcacactgcgtagaaacaggagtgaaaatcacggtagtggcgggagagcataacattgaagagacagagcacacggaacaaaagcgaaatgtcatcagaatcattccacaccataactataacgcggcaatcaataagtacaatcacgacatcgcacttttggagcttgacgaacctttggtgcttaattcgtacgtcacccctatttgtattgccgacaaagagtatacaaacatcttcttgaaattcggctccgggtacgtatcgggctggggcagagtgttccataagggtagatccgcactggtgttgcaatacctcagggtgcccctcgtggatcgagccacttgtctgcggtccaccaaattcacaatctacaacaatatgttctgtgcgggattccatgaaggtgggagagatagctgccagggagactcagggggtccccacgtgacggaagtcgaggggacgtcatttctgacgggaattatctcatggggagaggaatgtgcgatgaaggggaaatatggcatctacactaaagtgtcacggtatgtcaattggatcaaggaaaagacgaaactcacgtgataataggctggagcctcggtggccatgcttcttgccccttgggcctccccccagcccctcctccccttcctgcacccgtaccccccaaacaccattgtcacactccagtggtctttgaataaagtctgagtgggcggc

SEQ ID NO: 5031 - DNA, 1579 bp, synthetic construct
  misc_feature 1..1579: note = Description of Artificial Sequence: Synthetic Transcript Sequence
  source 1..1579: mol_type = other DNA
taatacgactcactatagggaaataagagagaaaagaagagtaagaagaaatataagagccaccatgcagcgcgtcaacatgattatggccgaatcgccgggactcatcacaatctgcctcttgggttatctcttgtcggcagaatgtaccgtgttcttggatcacgaaaacgcgaacaaaattcttaatcgcccgaagcggtataactccgggaaacttgaggagtttgtgcagggcaatcttgaacgagagtgcatggaggagaaatgctcctttgaggaggcgagggaagtgtttgaaaacacagagcgaacaacggagttttggaagcaatacgtagatggggaccagtgtgagtcgaatccgtgcctcaatgggggatcatgtaaagatgacatcaatagctatgaatgctggtgcccgtttgggtttgaagggaagaactgtgagctggatgtgacgtgcaacatcaaaaacggacgctgtgagcagttttgtaagaactcggctgacaataaggtagtatgctcgtgcacagagggataccggctggcggagaaccaaaaatcgtgcgagcccgcagtcccgttcccttgtgggagggtgagcgtgtcacagactagcaagttgacgagagcggagactgtattccccgacgtggactacgtcaacagcaccgaagccgaaacaatcctcgataacatcacgcagagcactcagtccttcaatgactttacgagggtcgtaggtggtgaggacgcgaaacccggtcagttcccctggcaggtggtattgaacggaaaagtcgatgccttttgtggaggttccattgtcaacgagaagtggattgtcacagcggcacactgcgtagaaacaggagtgaaaatcacggtagtggcgggagagcataacattgaagagacagagcacacggaacaaaagcgaaatgtcatcagaatcattccacaccataactataacgcggcaatcaataagtacaatcacgacatcgcacttttggagcttgacgaacctttggtgcttaattcgtacgtcacccctatttgtattgccgacaaagagtatacaaacatcttcttgaaattcggctccgggtacgtatcgggctggggcagagtgttccataagggtagatccgcactggtgttgcaatacctcagggtgcccctcgtggatcgagccacttgtctgcggtccaccaaattcacaatctacaacaatatgttctgtgcgggattccatgaaggtgggagagatagctgccagggagactcagggggtccccacgtgacggaagtcgaggggacgtcatttctgacgggaattatctcatggggagaggaatgtgcgatgaaggggaaatatggcatctacactaaagtgtcacggtatgtcaattggatcaaggaaaagacgaaactcacgtgataataggctggagcctcggtggccatgcttcttgccccttgggcctccccccagcccctcctccccttcctgcacccgtacccccacactccgtggtctttgaataaagtctgagtgggcggctctaga

SEQ ID NO: 5032 - RNA, 1556 nt, synthetic construct
  misc_feature 1..1556: note = Description of Artificial Sequence: Synthetic Transcript Sequence
  source 1..1556: mol_type = other RNA
gggaaataagagagaaaagaagagtaagaagaaatataagagccaccatgcagcgcgtcaacatgattatggccgaatcgccgggactcatcacaatctgcctcttgggttatctcttgtcggcagaatgtaccgtgttcttggatcacgaaaacgcgaacaaaattcttaatcgcccgaagcggtataactccgggaaacttgaggagtttgtgcagggcaatcttgaacgagagtgcatggaggagaaatgctcctttgaggaggcgagggaagtgtttgaaaacacagagcgaacaacggagttttggaagcaatacgtagatggggaccagtgtgagtcgaatccgtgcctcaatgggggatcatgtaaagatgacatcaatagctatgaatgctggtgcccgtttgggtttgaagggaagaactgtgagctggatgtgacgtgcaacatcaaaaacggacgctgtgagcagttttgtaagaactcggctgacaataaggtagtatgctcgtgcacagagggataccggctggcggagaaccaaaaatcgtgcgagcccgcagtcccgttcccttgtgggagggtgagcgtgtcacagactagcaagttgacgagagcggagactgtattccccgacgtggactacgtcaacagcaccgaagccgaaacaatcctcgataacatcacgcagagcactcagtccttcaatgactttacgagggtcgtaggtggtgaggacgcgaaacccggtcagttcccctggcaggtggtattgaacggaaaagtcgatgccttttgtggaggttccattgtcaacgagaagtggattgtcacagcggcacactgcgtagaaacaggagtgaaaatcacggtagtggcgggagagcataacattgaagagacagagcacacggaacaaaagcgaaatgtcatcagaatcattccacaccataactataacgcggcaatcaataagtacaatcacgacatcgcacttttggagcttgacgaacctttggtgcttaattcgtacgtcacccctatttgtattgccgacaaagagtatacaaacatcttcttgaaattcggctccgggtacgtatcgggctggggcagagtgttccataagggtagatccgcactggtgttgcaatacctcagggtgcccctcgtggatcgagccacttgtctgcggtccaccaaattcacaatctacaacaatatgttctgtgcgggattccatgaaggtgggagagatagctgccagggagactcagggggtccccacgtgacggaagtcgaggggacgtcatttctgacgggaattatctcatggggagaggaatgtgcgatgaaggggaaatatggcatctacactaaagtgtcacggtatgtcaattggatcaaggaaaagacgaaactcacgtgataataggctggagcctcggtggccatgcttcttgccccttgggcctccccccagcccctcctccccttcctgcacccgtacccccacactccgtggtctttgaataaagtctgagtgggcggc

SEQ ID NO: 5033 - DNA, 1587 bp, synthetic construct
  misc_feature 1..1587: note = Description of Artificial Sequence: Synthetic Transcript Sequence
  source 1..1587: mol_type = other DNA
taatacgactcactatagggaaataagagagaaaagaagagtaagaagaaatataagagccaccatgcagcgcgtcaacatgattatggccgaatcgccgggactcatcacaatctgcctcttgggttatctcttgtcggcagaatgtaccgtgttcttggatcacgaaaacgcgaacaaaattcttaatcgcccgaagcggtataactccgggaaacttgaggagtttgtgcagggcaatcttgaacgagagtgcatggaggagaaatgctcctttgaggaggcgagggaagtgtttgaaaacacagagcgaacaacggagttttggaagcaatacgtagatggggaccagtgtgagtcgaatccgtgcctcaatgggggatcatgtaaagatgacatcaatagctatgaatgctggtgcccgtttgggtttgaagggaagaactgtgagctggatgtgacgtgcaacatcaaaaacggacgctgtgagcagttttgtaagaactcggctgacaataaggtagtatgctcgtgcacagagggataccggctggcggagaaccaaaaatcgtgcgagcccgcagtcccgttcccttgtgggagggtgagcgtgtcacagactagcaagttgacgagagcggagactgtattccccgacgtggactacgtcaacagcaccgaagccgaaacaatcctcgataacatcacgcagagcactcagtccttcaatgactttacgagggtcgtaggtggtgaggacgcgaaacccggtcagttcccctggcaggtggtattgaacggaaaagtcgatgccttttgtggaggttccattgtcaacgagaagtggattgtcacagcggcacactgcgtagaaacaggagtgaaaatcacggtagtggcgggagagcataacattgaagagacagagcacacggaacaaaagcgaaatgtcatcagaatcattccacaccataactataacgcggcaatcaataagtacaatcacgacatcgcacttttggagcttgacgaacctttggtgcttaattcgtacgtcacccctatttgtattgccgacaaagagtatacaaacatcttcttgaaattcggctccgggtacgtatcgggctggggcagagtgttccataagggtagatccgcactggtgttgcaatacctcagggtgcccctcgtggatcgagccacttgtctgcggtccaccaaattcacaatctacaacaatatgttctgtgcgggattccatgaaggtgggagagatagctgccagggagactcagggggtccccacgtgacggaagtcgaggggacgtcatttctgacgggaattatctcatggggagaggaatgtgcgatgaaggggaaatatggcatctacactaaagtgtcacggtatgtcaattggatcaaggaaaagacgaaactcacgtgataataggctggagcctcggtggccatgcttcttgccccttgggcctccccccagcccctcctccccttcctgcacccgtaccccccaaacaccattgtcagtggtctttgaataaagtctgagtgggcggctctaga

SEQ ID NO: 5034 - RNA, 1564 nt, synthetic construct
  misc_feature 1..1564: note = Description of Artificial Sequence: Synthetic Transcript Sequence
  source 1..1564: mol_type = other RNA
gggaaataagagagaaaagaagagtaagaagaaatataagagccaccatgcagcgcgtcaacatgattatggccgaatcgccgggactcatcacaatctgcctcttgggttatctcttgtcggcagaatgtaccgtgttcttggatcacgaaaacgcgaacaaaattcttaatcgcccgaagcggtataactccgggaaacttgaggagtttgtgcagggcaatcttgaacgagagtgcatggaggagaaatgctcctttgaggaggcgagggaagtgtttgaaaacacagagcgaacaacggagttttggaagcaatacgtagatggggaccagtgtgagtcgaatccgtgcctcaatgggggatcatgtaaagatgacatcaatagctatgaatgctggtgcccgtttgggtttgaagggaagaactgtgagctggatgtgacgtgcaacatcaaaaacggacgctgtgagcagttttgtaagaactcggctgacaataaggtagtatgctcgtgcacagagggataccggctggcggagaaccaaaaatcgtgcgagcccgcagtcccgttcccttgtgggagggtgagcgtgtcacagactagcaagttgacgagagcggagactgtattccccgacgtggactacgtcaacagcaccgaagccgaaacaatcctcgataacatcacgcagagcactcagtccttcaatgactttacgagggtcgtaggtggtgaggacgcgaaacccggtcagttcccctggcaggtggtattgaacggaaaagtcgatgccttttgtggaggttccattgtcaacgagaagtggattgtcacagcggcacactgcgtagaaacaggagtgaaaatcacggtagtggcgggagagcataacattgaagagacagagcacacggaacaaaagcgaaatgtcatcagaatcattccacaccataactataacgcggcaatcaataagtacaatcacgacatcgcacttttggagcttgacgaacctttggtgcttaattcgtacgtcacccctatttgtattgccgacaaagagtatacaaacatcttcttgaaattcggctccgggtacgtatcgggctggggcagagtgttccataagggtagatccgcactggtgttgcaatacctcagggtgcccctcgtggatcgagccacttgtctgcggtccaccaaattcacaatctacaacaatatgttctgtgcgggattccatgaaggtgggagagatagctgccagggagactcagggggtccccacgtgacggaagtcgaggggacgtcatttctgacgggaattatctcatggggagaggaatgtgcgatgaaggggaaatatggcatctacactaaagtgtcacggtatgtcaattggatcaaggaaaagacgaaactcacgtgataataggctggagcctcggtggccatgcttcttgccccttgggcctccccccagcccctcctccccttcctgcacccgtaccccccaaacaccattgtcagtggtctttgaataaagtctgagtgggcggc

SEQ ID NO: 5035 - DNA, 1596 bp, synthetic construct
  misc_feature 1..1596: note = Description of Artificial Sequence: Synthetic Transcript Sequence
  source 1..1596: mol_type = other DNA
taatacgactcactatagggaaataagagagaaaagaagagtaagaagaaatataagagccaccatgcagcgcgtcaacatgattatggccgaatcgccgggactcatcacaatctgcctcttgggttatctcttgtcggcagaatgtaccgtgttcttggatcacgaaaacgcgaacaaaattcttaatcgcccgaagcggtataactccgggaaacttgaggagtttgtgcagggcaatcttgaacgagagtgcatggaggagaaatgctcctttgaggaggcgagggaagtgtttgaaaacacagagcgaacaacggagttttggaagcaatacgtagatggggaccagtgtgagtcgaatccgtgcctcaatgggggatcatgtaaagatgacatcaatagctatgaatgctggtgcccgtttgggtttgaagggaagaactgtgagctggatgtgacgtgcaacatcaaaaacggacgctgtgagcagttttgtaagaactcggctgacaataaggtagtatgctcgtgcacagagggataccggctggcggagaaccaaaaatcgtgcgagcccgcagtcccgttcccttgtgggagggtgagcgtgtcacagactagcaagttgacgagagcggagactgtattccccgacgtggactacgtcaacagcaccgaagccgaaacaatcctcgataacatcacgcagagcactcagtccttcaatgactttacgagggtcgtaggtggtgaggacgcgaaacccggtcagttcccctggcaggtggtattgaacggaaaagtcgatgccttttgtggaggttccattgtcaacgagaagtggattgtcacagcggcacactgcgtagaaacaggagtgaaaatcacggtagtggcgggagagcataacattgaagagacagagcacacggaacaaaagcgaaatgtcatcagaatcattccacaccataactataacgcggcaatcaataagtacaatcacgacatcgcacttttggagcttgacgaacctttggtgcttaattcgtacgtcacccctatttgtattgccgacaaagagtatacaaacatcttcttgaaattcggctccgggtacgtatcgggctggggcagagtgttccataagggtagatccgcactggtgttgcaatacctcagggtgcccctcgtggatcgagccacttgtctgcggtccaccaaattcacaatctacaacaatatgttctgtgcgggattccatgaaggtgggagagatagctgccagggagactcagggggtccccacgtgacggaagtcgaggggacgtcatttctgacgggaattatctcatggggagaggaatgtgcgatgaaggggaaatatggcatctacactaaagtgtcacggtatgtcaattggatcaaggaaaagacgaaactcacgtgataataggctgccttctgcggggcttgccttctggccatgcccttcttctctcccttgcacctgtacctctcaaacaccattgtcacactccatggtctttgaataaagcctgagtaggaaggcggccgctcgagcatgcatctaga

SEQ ID NO: 5036 - RNA, 1554 nt, synthetic construct
  misc_feature 1..1554: note = Description of Artificial Sequence: Synthetic Transcript Sequence
  source 1..1554: mol_type = other RNA
gggaaataagagagaaaagaagagtaagaagaaatataagagccaccatgcagcgcgtcaacatgattatggccgaatcgccgggactcatcacaatctgcctcttgggttatctcttgtcggcagaatgtaccgtgttcttggatcacgaaaacgcgaacaaaattcttaatcgcccgaagcggtataactccgggaaacttgaggagtttgtgcagggcaatcttgaacgagagtgcatggaggagaaatgctcctttgaggaggcgagggaagtgtttgaaaacacagagcgaacaacggagttttggaagcaatacgtagatggggaccagtgtgagtcgaatccgtgcctcaatgggggatcatgtaaagatgacatcaatagctatgaatgctggtgcccgtttgggtttgaagggaagaactgtgagctggatgtgacgtgcaacatcaaaaacggacgctgtgagcagttttgtaagaactcggctgacaataaggtagtatgctcgtgcacagagggataccggctggcggagaaccaaaaatcgtgcgagcccgcagtcccgttcccttgtgggagggtgagcgtgtcacagactagcaagttgacgagagcggagactgtattccccgacgtggactacgtcaacagcaccgaagccgaaacaatcctcgataacatcacgcagagcactcagtccttcaatgactttacgagggtcgtaggtggtgaggacgcgaaacccggtcagttcccctggcaggtggtattgaacggaaaagtcgatgccttttgtggaggttccattgtcaacgagaagtggattgtcacagcggcacactgcgtagaaacaggagtgaaaatcacggtagtggcgggagagcataacattgaagagacagagcacacggaacaaaagcgaaatgtcatcagaatcattccacaccataactataacgcggcaatcaataagtacaatcacgacatcgcacttttggagcttgacgaacctttggtgcttaattcgtacgtcacccctatttgtattgccgacaaagagtatacaaacatcttcttgaaattcggctccgggtacgtatcgggctggggcagagtgttccataagggtagatccgcactggtgttgcaatacctcagggtgcccctcgtggatcgagccacttgtctgcggtccaccaaattcacaatctacaacaatatgttctgtgcgggattccatgaaggtgggagagatagctgccagggagactcagggggtccccacgtgacggaagtcgaggggacgtcatttctgacgggaattatctcatggggagaggaatgtgcgatgaaggggaaatatggcatctacactaaagtgtcacggtatgtcaattggatcaaggaaaagacgaaactcacgtgataataggctgccttctgcggggcttgccttctggccatgcccttcttctctcccttgcacctgtacctctcaaacaccattgtcacactccatggtctttgaataaagcctgagtaggaag

SEQ ID NO: 5037 - DNA, 1581 bp, synthetic construct
  misc_feature 1..1581: note = Description of Artificial Sequence: Synthetic Transcript Sequence
  source 1..1581: mol_type = other DNA
taatacgactcactatagggaaataagagagaaaagaagagtaagaagaaatataagagccaccatgcagcgcgtcaacatgattatggccgaatcgccgggactcatcacaatctgcctcttgggttatctcttgtcggcagaatgtaccgtgttcttggatcacgaaaacgcgaacaaaattcttaatcgcccgaagcggtataactccgggaaacttgaggagtttgtgcagggcaatcttgaacgagagtgcatggaggagaaatgctcctttgaggaggcgagggaagtgtttgaaaacacagagcgaacaacggagttttggaagcaatacgtagatggggaccagtgtgagtcgaatccgtgcctcaatgggggatcatgtaaagatgacatcaatagctatgaatgctggtgcccgtttgggtttgaagggaagaactgtgagctggatgtgacgtgcaacatcaaaaacggacgctgtgagcagttttgtaagaactcggctgacaataaggtagtatgctcgtgcacagagggataccggctggcggagaaccaaaaatcgtgcgagcccgcagtcccgttcccttgtgggagggtgagcgtgtcacagactagcaagttgacgagagcggagactgtattccccgacgtggactacgtcaacagcaccgaagccgaaacaatcctcgataacatcacgcagagcactcagtccttcaatgactttacgagggtcgtaggtggtgaggacgcgaaacccggtcagttcccctggcaggtggtattgaacggaaaagtcgatgccttttgtggaggttccattgtcaacgagaagtggattgtcacagcggcacactgcgtagaaacaggagtgaaaatcacggtagtggcgggagagcataacattgaagagacagagcacacggaacaaaagcgaaatgtcatcagaatcattccacaccataactataacgcggcaatcaataagtacaatcacgacatcgcacttttggagcttgacgaacctttggtgcttaattcgtacgtcacccctatttgtattgccgacaaagagtatacaaacatcttcttgaaattcggctccgggtacgtatcgggctggggcagagtgttccataagggtagatccgcactggtgttgcaatacctcagggtgcccctcgtggatcgagccacttgtctgcggtccaccaaattcacaatctacaacaatatgttctgtgcgggattccatgaaggtgggagagatagctgccagggagactcagggggtccccacgtgacggaagtcgaggggacgtcatttctgacgggaattatctcatggggagaggaatgtgcgatgaaggggaaatatggcatctacactaaagtgtcacggtatgtcaattggatcaaggaaaagacgaaactcacgtgataataggctgccttctgcggggcttgccttctggccatgcccttcttctctcccttgcacctgtacctctacactcctggtctttgaataaagcctgagtaggaaggcggccgctcgagcatgcatctaga

SEQ ID NO: 5038 - RNA, 1539 nt, synthetic construct
  misc_feature 1..1539: note = Description of Artificial Sequence: Synthetic Transcript Sequence
  source 1..1539: mol_type = other RNA
gggaaataagagagaaaagaagagtaagaagaaatataagagccaccatgcagcgcgtcaacatgattatggccgaatcgccgggactcatcacaatctgcctcttgggttatctcttgtcggcagaatgtaccgtgttcttggatcacgaaaacgcgaacaaaattcttaatcgcccgaagcggtataactccgggaaacttgaggagtttgtgcagggcaatcttgaacgagagtgcatggaggagaaatgctcctttgaggaggcgagggaagtgtttgaaaacacagagcgaacaacggagttttggaagcaatacgtagatggggaccagtgtgagtcgaatccgtgcctcaatgggggatcatgtaaagatgacatcaatagctatgaatgctggtgcccgtttgggtttgaagggaagaactgtgagctggatgtgacgtgcaacatcaaaaacggacgctgtgagcagttttgtaagaactcggctgacaataaggtagtatgctcgtgcacagagggataccggctggcggagaaccaaaaatcgtgcgagcccgcagtcccgttcccttgtgggagggtgagcgtgtcacagactagcaagttgacgagagcggagactgtattccccgacgtggactacgtcaacagcaccgaagccgaaacaatcctcgataacatcacgcagagcactcagtccttcaatgactttacgagggtcgtaggtggtgaggacgcgaaacccggtcagttcccctggcaggtggtattgaacggaaaagtcgatgccttttgtggaggttccattgtcaacgagaagtggattgtcacagcggcacactgcgtagaaacaggagtgaaaatcacggtagtggcgggagagcataacattgaagagacagagcacacggaacaaaagcgaaatgtcatcagaatcattccacaccataactataacgcggcaatcaataagtacaatcacgacatcgcacttttggagcttgacgaacctttggtgcttaattcgtacgtcacccctatttgtattgccgacaaagagtatacaaacatcttcttgaaattcggctccgggtacgtatcgggctggggcagagtgttccataagggtagatccgcactggtgttgcaatacctcagggtgcccctcgtggatcgagccacttgtctgcggtccaccaaattcacaatctacaacaatatgttctgtgcgggattccatgaaggtgggagagatagctgccagggagactcagggggtccccacgtgacggaagtcgaggggacgtcatttctgacgggaattatctcatggggagaggaatgtgcgatgaaggggaaatatggcatctacactaaagtgtcacggtatgtcaattggatcaaggaaaagacgaaactcacgtgataataggctgccttctgcggggcttgccttctggccatgcccttcttctctcccttgcacctgtacctctacactcctggtctttgaataaagcctgagtaggaag

SEQ ID NO: 5039 - DNA, 1589 bp, synthetic construct
  misc_feature 1..1589: note = Description of Artificial Sequence: Synthetic Transcript Sequence
  source 1..1589: mol_type = other DNA
taatacgactcactatagggaaataagagagaaaagaagagtaagaagaaatataagagccaccatgcagcgcgtcaacatgattatggccgaatcgccgggactcatcacaatctgcctcttgggttatctcttgtcggcagaatgtaccgtgttcttggatcacgaaaacgcgaacaaaattcttaatcgcccgaagcggtataactccgggaaacttgaggagtttgtgcagggcaatcttgaacgagagtgcatggaggagaaatgctcctttgaggaggcgagggaagtgtttgaaaacacagagcgaacaacggagttttggaagcaatacgtagatggggaccagtgtgagtcgaatccgtgcctcaatgggggatcatgtaaagatgacatcaatagctatgaatgctggtgcccgtttgggtttgaagggaagaactgtgagctggatgtgacgtgcaacatcaaaaacggacgctgtgagcagttttgtaagaactcggctgacaataaggtagtatgctcgtgcacagagggataccggctggcggagaaccaaaaatcgtgcgagcccgcagtcccgttcccttgtgggagggtgagcgtgtcacagactagcaagttgacgagagcggagactgtattccccgacgtggactacgtcaacagcaccgaagccgaaacaatcctcgataacatcacgcagagcactcagtccttcaatgactttacgagggtcgtaggtggtgaggacgcgaaacccggtcagttcccctggcaggtggtattgaacggaaaagtcgatgccttttgtggaggttccattgtcaacgagaagtggattgtcacagcggcacactgcgtagaaacaggagtgaaaatcacggtagtggcgggagagcataacattgaagagacagagcacacggaacaaaagcgaaatgtcatcagaatcattccacaccataactataacgcggcaatcaataagtacaatcacgacatcgcacttttggagcttgacgaacctttggtgcttaattcgtacgtcacccctatttgtattgccgacaaagagtatacaaacatcttcttgaaattcggctccgggtacgtatcgggctggggcagagtgttccataagggtagatccgcactggtgttgcaatacctcagggtgcccctcgtggatcgagccacttgtctgcggtccaccaaattcacaatctacaacaatatgttctgtgcgggattccatgaaggtgggagagatagctgccagggagactcagggggtccccacgtgacggaagtcgaggggacgtcatttctgacgggaattatctcatggggagaggaatgtgcgatgaaggggaaatatggcatctacactaaagtgtcacggtatgtcaattggatcaaggaaaagacgaaactcacgtgataataggctgccttctgcggggcttgccttctggccatgcccttcttctctcccttgcacctgtacctctcaaacaccattgtcatggtctttgaataaagcctgagtaggaaggcggccgctcgagcatgcatctaga

SEQ ID NO: 5040 - RNA, 1547 nt, synthetic construct
  misc_feature 1..1547: note = Description of Artificial Sequence: Synthetic Transcript Sequence
  source 1..1547: mol_type = other RNA
gggaaataagagagaaaagaagagtaagaagaaatataagagccaccatgcagcgcgtcaacatgattatggccgaatcgccgggactcatcacaatctgcctcttgggttatctcttgtcggcagaatgtaccgtgttcttggatcacgaaaacgcgaacaaaattcttaatcgcccgaagcggtataactccgggaaacttgaggagtttgtgcagggcaatcttgaacgagagtgcatggaggagaaatgctcctttgaggaggcgagggaagtgtttgaaaacacagagcgaacaacggagttttggaagcaatacgtagatggggaccagtgtgagtcgaatccgtgcctcaatgggggatcatgtaaagatgacatcaatagctatgaatgctggtgcccgtttgggtttgaagggaagaactgtgagctggatgtgacgtgcaacatcaaaaacggacgctgtgagcagttttgtaagaactcggctgacaataaggtagtatgctcgtgcacagagggataccggctggcggagaaccaaaaatcgtgcgagcccgcagtcccgttcccttgtgggagggtgagcgtgtcacagactagcaagttgacgagagcggagactgtattccccgacgtggactacgtcaacagcaccgaagccgaaacaatcctcgataacatcacgcagagcactcagtccttcaatgactttacgagggtcgtaggtggtgaggacgcgaaacccggtcagttcccctggcaggtggtattgaacggaaaagtcgatgccttttgtggaggttccattgtcaacgagaagtggattgtcacagcggcacactgcgtagaaacaggagtgaaaatcacggtagtggcgggagagcataacattgaagagacagagcacacggaacaaaagcgaaatgtcatcagaatcattccacaccataactataacgcggcaatcaataagtacaatcacgacatcgcacttttggagcttgacgaacctttggtgcttaattcgtacgtcacccctatttgtattgccgacaaagagtatacaaacatcttcttgaaattcggctccgggtacgtatcgggctggggcagagtgttccataagggtagatccgcactggtgttgcaatacctcagggtgcccctcgtggatcgagccacttgtctgcggtccaccaaattcacaatctacaacaatatgttctgtgcgggattccatgaaggtgggagagatagctgccagggagactcagggggtccccacgtgacggaagtcgaggggacgtcatttctgacgggaattatctcatggggagaggaatgtgcgatgaaggggaaatatggcatctacactaaagtgtcacggtatgtcaattggatcaaggaaaagacgaaactcacgtgataataggctgccttctgcggggcttgccttctggccatgcccttcttctctcccttgcacctgtacctctcaaacaccattgtcatggtctttgaataaagcctgagtaggaag

SEQ ID NO: 5041 - protein, 11 aa, Homo sapiens
MSCSGCNGMWA

SEQ ID NO: 5042 - protein, 11 aa, Homo sapiens
RNSGAGMGRMR

SEQ ID NO: 5043 - protein, 13 aa, Homo sapiens
RNSGAGMGRMRRR

SEQ ID NO: 5044 - protein, 12 aa, Homo sapiens
RMSCSGCNGMWR

SEQ ID NO: 5045 - DNA, 10 bp, Homo sapiens
  source 1..10: mol_type = genomic DNA
gacgagagga

SEQ ID NO: 5046 - DNA, 10 bp, Homo sapiens
  source 1..10: mol_type = genomic DNA
gacgagagaa

SEQ ID NO: 5047 - DNA, 10 bp, Homo sapiens
  source 1..10: mol_type = genomic DNA
cgccgctgaa

SEQ ID NO: 5048 - DNA, 10 bp, Homo sapiens
  source 1..10: mol_type = genomic DNA
cgccgcggaa

SEQ ID NO: 5049 - DNA, 10 bp, Homo sapiens
  source 1..10: mol_type = genomic DNA
cgccgccgaa

SEQ ID NO: 5050 - DNA, 10 bp, Homo sapiens
  source 1..10: mol_type = genomic DNA
agccgccgca

SEQ ID NO: 5051 - DNA, 10 bp, Homo sapiens
  source 1..10: mol_type = genomic DNA
acgccgccga

SEQ ID NO: 5052 - DNA, 12 bp, Homo sapiens
  source 1..12: mol_type = genomic DNA
ggcattcatcgt

SEQ ID NO: 5053 - DNA, 12 bp, Homo sapiens
  source 1..12: mol_type = genomic DNA
gcattagtatct

SEQ ID NO: 5054 - DNA, 12 bp, Homo sapiens
  source 1..12: mol_type = genomic DNA
tcggttattgtt

SEQ ID NO: 5055 - DNA, 12 bp, Homo sapiens
  source 1..12: mol_type = genomic DNA
tccaattgggaa

SEQ ID NO: 5056 - DNA, 12 bp, Homo sapiens
  source 1..12: mol_type = genomic DNA
atctattggcca

SEQ ID NO: 5057 - DNA, 12 bp, Homo sapiens
  source 1..12: mol_type = genomic DNA
ttactgggtgtt

SEQ ID NO: 5058 - DNA, 12 bp, Homo sapiens
  source 1..12: mol_type = genomic DNA
agggtgaaggtc

SEQ ID NO: 5059 - DNA, 12 bp, Homo sapiens
  source 1..12: mol_type = genomic DNA
ggtgggtgtgtc

SEQ ID NO: 5060 - DNA, 12 bp, Homo sapiens
  source 1..12: mol_type = genomic DNA
cgcttcaatgct

SEQ ID NO: 5061 - DNA, 12 bp, Homo sapiens
  source 1..12: mol_type = genomic DNA
tgcttcaatgcc

SEQ ID NO: 5062 - DNA, 12 bp, Homo sapiens
  source 1..12: mol_type = genomic DNA
tgtgtctttgca

SEQ ID NO: 5063 - DNA, 12 bp, Homo sapiens
  source 1..12: mol_type = genomic DNA
cacggggacagc

SEQ ID NO: 5064 - DNA, 12 bp, Homo sapiens
  source 1..12: mol_type = genomic DNA
aagctgtacatg

SEQ ID NO: 5065 - DNA, 12 bp, Homo sapiens
  source 1..12: mol_type = genomic DNA
gatgggggcaca

SEQ ID NO: 5066 - DNA, 12 bp, Homo sapiens
  source 1..12: mol_type = genomic DNA
atatgtgccctt

SEQ ID NO: 5067 - DNA, 12 bp, Homo sapiens
  source 1..12: mol_type = genomic DNA
tccttctgggtc

SEQ ID NO: 5068 - DNA, 12 bp, Homo sapiens
  source 1..12: mol_type = genomic DNA
ggtgggtgtgtc

SEQ ID NO: 5069 - DNA, 12 bp, Homo sapiens
  source 1..12: mol_type = genomic DNA
gaatggatgggg

SEQ ID NO: 5070 - DNA, 12 bp, Homo sapiens
  misc_difference 3: note = modified_base - n = a, c, t or g
  misc_difference 3: note = n is a, c, g, or t
  source 1..12: mol_type = genomic DNA
cangtgatattc

SEQ ID NO: 5071 - DNA, 12 bp, Homo sapiens
  source 1..12: mol_type = genomic DNA
aggagggtttgt

SEQ ID NO: 5072 - DNA, 12 bp, Homo sapiens
  source 1..12: mol_type = genomic DNA
tgggcgagtggg

SEQ ID NO: 5073 - DNA, 12 bp, Homo sapiens
  source 1..12: mol_type = genomic DNA
cggctcaccagt

SEQ ID NO: 5074 - DNA, 12 bp, Homo sapiens
  misc_difference 7: note = modified_base - n= a, t, c or g
  misc_difference 7: note = n is a, c, g, or t
  source 1..12: mol_type = genomic DNA
ggtttcnataac

SEQ ID NO: 5075 - DNA, 12 bp, Homo sapiens
  source 1..12: mol_type = genomic DNA
ggtgggtgtgtc

SEQ ID NO: 5076 - DNA, 12 bp, Homo sapiens
  source 1..12: mol_type = genomic DNA
ttactgggtgtt

SEQ ID NO: 5077 - DNA, 12 bp, Homo sapiens
  source 1..12: mol_type = genomic DNA
aagtctttgggt

SEQ ID NO: 5078 - DNA, 90 bp, Homo sapiens
  source 1..90: mol_type = genomic DNA
gggagacggcggcggtggcggcgcgggcagagcaaggacgcggcggatcccactcgcacagcagcgcactcggtgccccgcgcagggtcg

SEQ ID NO: 5079 - DNA, 75 bp, Homo sapiens
  source 1..75: mol_type = genomic DNA
aaagaaatggaatcgaagagaatggaaacaaatggaatggaattgaatggaatggaattgaatggaatgggaacg

SEQ ID NO: 5080 - DNA, 75 bp, Homo sapiens; identical to SEQ ID NO: 5079
  source 1..75: mol_type = genomic DNA

SEQ ID NO: 5081 - DNA, 87 bp, Homo sapiens
  source 1..87: mol_type = genomic DNA
agacagtcagacaatcacaaagaaacaagaatgaaaatgaatgaacaaaaccttcaagaaatatgggattatgaagaggccaaatgt

SEQ ID NO: 5082 - DNA, 78 bp, Homo sapiens
  source 1..78: mol_type = genomic DNA
aaaaggaaatacaagacaacaaacacagaaacacaaccatcgggcatcatgaaacctcgtgaagataatcatcagggt

SEQ ID NO: 5083 - DNA, 88 bp, Homo sapiens
  source 1..88: mol_type = genomic DNA
agaccctaatatcacagttaaacgaactagagaaggaagagcaaacaaattcaaaagctagcggaaagcaagaaataactaagaccag

SEQ ID NO: 5084 - DNA, 90 bp, Homo sapiens
  source 1..90: mol_type = genomic DNA
aaagacttaaacataagacctaaaaccataaaaaccacagaagaaaacataggcaatgccattcaggacataggcatgggcaaagacttc

SEQ ID NO: 5085 - DNA, 92 bp, Homo sapiens
  source 1..92: mol_type = genomic DNA
agcaataaccaaacaacctcattaaaaagtaggcaaaggacataaacagacacttttcaaaagaagacatacacgtggccaacaaacatatg

SEQ ID NO: 5086 - DNA, 90 bp, Homo sapiens
  source 1..90: mol_type = genomic DNA
agaaagaatcaagaggaaatgcaagaaatccaaaacactgtaacagatatgatgaataatgaggtatgcactcatcagcagactcgacat

SEQ ID NO: 5087 - DNA, 75 bp, Homo sapiens
  source 1..75: mol_type = genomic DNA
gcactagtcagatcaagacagaaagtcaacgaacaaagaacagacttaaactacactctagaacaaatggaccta

SEQ ID NO: 5088 - DNA, 72 bp, Homo sapiens
  source 1..72: mol_type = genomic DNA
agcagccaacaagcatatgaaataatgctccacaacactcatcatcagagaaatgcaaatcaaaaccaaaat

SEQ ID NO: 5089 - DNA, 90 bp, Homo sapiens
  source 1..90: mol_type = genomic DNA
aatatacgcaaatcaataaatgtaatccagcatataaacagtactaaagacaaaaaccacatgattatctcaatagatgcagaaaaggcc

SEQ ID NO: 5090 - DNA, 92 bp, Homo sapiens
  source 1..92: mol_type = genomic DNA
atgtacacaaatcaataaatgcagtccagcatataaacagaaccaaacacaaaaaccacatgattatctcaatagatgcagaaaaggccttt

SEQ ID NO: 5091 - DNA, 84 bp, Homo sapiens
  source 1..84: mol_type = genomic DNA
tataccacacaaatgcaaaagattattagcaacaattatcaacagcaatatgtcaacaagttgacaaacctagaggacatggat

SEQ ID NO: 5092 - DNA, 85 bp, Homo sapiens
  source 1..85: mol_type = genomic DNA
aaacacacaaagcaacaaaagaacgaagcaacaaaagcatagatttattgaaatgaaagtacattctacagagtgggggcaggct

SEQ ID NO: 5093 - DNA, 72 bp, Homo sapiens
  source 1..72: mol_type = genomic DNA
gaaatcatcatcaaacggaatcgaatggaatcattgaatggaatggaatggaatcatcatggaatggaaacg

SEQ ID NO: 5094 - DNA, 90 bp, Homo sapiens
  source 1..90: mol_type = genomic DNA
aacagaatggaatcaaatcgaatgaaatggaatggaatagaaaggaatggaatgaaatggaatggaaaggattcgaatggaatgcaatcg

SEQ ID NO: 5095 - DNA, 102 bp, Homo sapiens
  source 1..102: mol_type = genomic DNA
tacaaagaactcaaacaaatcagcaagaacaaaaacaatcccaacaaaatgttggacaaagacatgaatagacaattctcgaaagaagatgtacaaatggct

SEQ ID NO: 5096 - DNA, 79 bp, Homo sapiens
  source 1..79: mol_type = genomic DNA
tgttgagagaaattaaacaaagcacagataaatggaaaaacgtgttcatagattgaaagacttcatgttgtatggtgtc

SEQ ID NO: 5097 - DNA, 124 bp, Homo sapiens
  source 1..124: mol_type = genomic DNA
aaacgattggacaggaatggaatcaccatcgaatggaaacgaatggaatcttcgaatggaattgaatgaaattattgaacggaatcaaatagaatcatcattgaacagaatcaaattggatcat

SEQ ID NO: 5098 - DNA, 85 bp, Homo sapiens
  source 1..85: mol_type = genomic DNA
aacaataaacaaactccaactagacacaatagtcaaattgctgaaaatgaaatataaaggaacaatctcgatggtagcccaagga

SEQ ID NO: 5099 - DNA, 84 bp, Homo sapiens
  source 1..84: mol_type = genomic DNA
aaatcaataaatgtaattcagcatataaacagaaccaaagacaaaaaccacatgattatctcaatagatgcagaaaaggccttt

SEQ ID NO: 5100 - DNA, 84 bp, Homo sapiens
  source 1..84: mol_type = genomic DNA
gctcaaggaaataaaataggacacaaagaaatggaaaaacattccatactcatggatagaaagaatcaatatcatgaaatggcc

SEQ ID NO: 5101 - DNA, 90 bp, Homo sapiens
  source 1..90: mol_type = genomic DNA
aacatacgcaaatcaataaatgtaatccagcatataaacagaaccaaagacaaaaaccacatgattatctcaatagatgcagaaaaggcc

SEQ ID NO: 5102 - DNA, 84 bp, Homo sapiens
  source 1..84: mol_type = genomic DNA
aacaatcactagtccttaagtaagagacaacaccttttgtcacacacagtttgtcctaactttatcttggtaattggggagacc

SEQ ID NO: 5103 - DNA, 54 bp, Homo sapiens
  source 1..54: mol_type = genomic DNA
agaaaacacacagacaacaaaaaacacagaacgacaatgacaaaatggccaagc

SEQ ID NO: 5104 - DNA, 87 bp, Homo sapiens
  source 1..87: mol_type = genomic DNA
acacaacaaccaagaaacaaccccattaagaagtgggaaaaatacatgaataaacacatctcaaaagaagacaaacaagtggctaac

SEQ ID NO: 5105 - DNA, 88 bp, Homo sapiens
  source 1..88: mol_type = genomic DNA
acagcagaaaacgaacatcagaaaatcactctacatgatgcttaaatacagagggcaagcaacccaagagaaaacaccacttcctaat

SEQ ID NO: 5106 - DNA, 90 bp, Homo sapiens
  source 1..90: mol_type = genomic DNA
gaatagaacagaatggaatcaaatcgaatgaaatggaatggaatagaaaggaatggaatgaaatggaatggaaaggattcgaatggaatg

SEQ ID NO: 5107 - DNA, 68 bp, Homo sapiens
  source 1..68: mol_type = genomic DNA
taagcagagaaaatatcaacacgaaaataatgcaaggagaaaaatacagaacaatccaaaatgtggcc

SEQ ID NO: 5108 - DNA, 84 bp, Homo sapiens
  source 1..84: mol_type = genomic DNA
gaacaatcaatggaagcagaaacaaataaaccaaggtgtgcatcaaggaatacattcacgcatgatggctgtatgagtaaaatg

SEQ ID NO: 5109 - DNA, 81 bp, Homo sapiens
  source 1..81: mol_type = genomic DNA
gatcaataaatgtaattcatcatataaacagagaactaaagacaaaaacacatgattatcgcaatacatgcagaaaaggcc

SEQ ID NO: 5110 - DNA, 91 bp, Homo sapiens
  source 1..91: mol_type = genomic DNA
gacaagagttcagaaaggaagactacacagaaatacgcattttaaagtcactgacatggagatgacacttaaaaccatgaacatggatggg

SEQ ID NO: 5111 - DNA, 91 bp, Homo sapiens
  source 1..91: mol_type = genomic DNA
aagcaaagaaagaatgaagcagcaaaagaacgaaagcaggaatttattgaaaaccaaagtacactccacagtatgggagcggacccgagca

SEQ ID NO: 5112 - DNA, 75 bp, Homo sapiens
  source 1..75: mol_type = genomic DNA
accaacataagacaaagaaacatccagcagctgcctatggcaaaagattacaatgtgtcaaacaagagggcaatg

SEQ ID NO: 5113 - DNA, 88 bp, Homo sapiens
  source 1..88: mol_type = genomic DNA
ggacaaattgctagaaataaacaaattaccaaaaatgattcaagtagagacagagaatcaaaatagaactacacataagtgggccaag

SEQ ID NO: 5114 - DNA, 75 bp, Homo sapiens
  source 1..75: mol_type = genomic DNA
aacataatccatcaaataaacagaaccaaagacaaaaaccacatgattatctcaatagatgcagaaaaggccttc

SEQ ID NO: 5115 - DNA, 96 bp, Homo sapiens
  source 1..96: mol_type = genomic DNA
aaaatcaatatgaaaacaaacacaagcagacaaagaaaattgggcaaaaggtttgagcagacacttcaccaaagaagtacaaatggcaaatcagca

SEQ ID NO: 5116 - DNA, 88 bp, Homo sapiens
  source 1..88: mol_type = genomic DNA
aaccaaattagacaaattggaaatcattacacataacaaaagtaataaactgtcagcctcagtagtattcattgtacataaactggcc

SEQ ID NO: 5117 - DNA, 105 bp, Homo sapiens
  source 1..105: mol_type = genomic DNA
aaggaatttaagcaaatcaacaagcaaaaccaaaataatcccattaaaaagtgggtaaaggacatgaatacacacttgtcaatagaggacattcaagtggccaac

SEQ ID NO: 5118 - DNA, 96 bp, Homo sapiens
  source 1..96: mol_type = genomic DNA
taacctgatttgccataatccacgatacgcttacaacagtgatatacaagttacatgagaaacacaaacattttgcaaggaaactgtggccagatg

SEQ ID NO: 5119 - DNA, 95 bp, Homo sapiens
  source 1..95: mol_type = genomic DNA
aactaacacaagaacagaaaaccaaacatcacatgttctcactcataagcgggagctgaacaatgagaacacacggacacagggagaggaacatg

SEQ ID NO: 5120 - DNA, 89 bp, Homo sapiens
  source 1..89: mol_type = genomic DNA
taaactgacacaaacacagacacacagatacacacatacatacagaaatacacattcacacacagacctggtctttggagccagagatg

SEQ ID NO: 5121 - DNA, 83 bp, Homo sapiens
  source 1..83: mol_type = genomic DNA
atcaacagacaacagaaacaaatccacaaagcacttagttattagaactgtcatacagactgtacaacaaccacatttaccat

SEQ ID NO: 5122 - DNA, 97 bp, Homo sapiens
  source 1..97: mol_type = genomic DNA
aaataagccaacggtcataaattgcaaagccttttacaatccaaacatgatggaaacgatatgccattttgaaggtgatttgaaaagcacatggttt

SEQ ID NO: 5123 - DNA, 99 bp, Homo sapiens
  source 1..99: mol_type = genomic DNA
aaacagttcaaaaattattgcaacaaaatgagagagatgagtttatcttgcaaactaatggatggtagcagtgacagtggcaaaacgtggtttgattct

SEQ ID NO: 5124 - DNA, 99 bp, Homo sapiens
  source 1..99: mol_type = genomic DNA
taagcaacttcagcaaagtctcaggatacaaaatcaatgtacaaaaatcacaagcattcttatacaccaacaacagacaaacaagagtgccaaatcatg

SEQ ID NO: 5125 - DNA, 133 bp, Homo sapiens
  source 1..133: mol_type = genomic DNA
agcaaacaaacaaacaaacaaacaaactatgacaggaacaaaacgtcacatatcaacattaacaaagaatgtaaacagcctaaatgcttcacttaaaagttatagacaggggctgggcatggtggctcacgcc

SEQ ID NO: 5126 - DNA, 84 bp, Homo sapiens
  source 1..84: mol_type = genomic DNA
ggaaataacagagaacacaaacaaatgggaaaacattccatgttcatggataggaagaatcaatattgtgaaaatggccatact

SEQ ID NO: 5127 - DNA, 88 bp, Homo sapiens
  source 1..88: mol_type = genomic DNA
agcaacttcagcaaagtctcaggatacaaaatcaatgtacaaaaatcacaagcattcttatacaccaataacagacaaacagagagcc

SEQ ID NO: 5128 - DNA, 84 bp, Homo sapiens
  source 1..84: mol_type = genomic DNA
agataagaataaggcaaacatagtaatagggagttcatgaataacacacggaaagagaacttacagggctgtgatcaggaaacg

SEQ ID NO: 5129 - DNA, 85 bp, Homo sapiens
  source 1..85: mol_type = genomic DNA
aggaaataaaagaagacacaaacaaatggaagaacattccatgcttatggatagggagaatcagtatcgtgaaaatggccatact

SEQ ID NO: 5130 - DNA, 93 bp, Homo sapiens
  source 1..93: mol_type = genomic DNA
aacatacgaaaatcaataaacgtaatccagcatataaacagaaccaaagacaaaaaccacatgattatctcaatagatgcagaaaaggccttt

SEQ ID NO: 5131 - DNA, 85 bp, Homo sapiens
  source 1..85: mol_type = genomic DNA
aatggactcgaatgaaatcatcatcaaacggaatcgaatggaatcattgaatggaatggaatggaatcatcatggaatggaaacg

SEQ ID NO: 5132 - DNA, 92 bp, Homo sapiens
  source 1..92: mol_type = genomic DNA
aagatttaaacataagacctaaaacgacaaaaatcctaggagaaaacctaagcaataccattcaggacataggcatgggcaaagacttcatg

SEQ ID NO: 5133 - DNA, 87 bp, Homo sapiens
  source 1..87: mol_type = genomic DNA
taatgagaagacacagacaacacaaagaatcacagaaacatgacacaggtgacaagaacaggcaaggacctgcagtgcacaggagcc

SEQ ID NO: 5134 - DNA, 80 bp, Homo sapiens
  source 1..80: mol_type = genomic DNA
taaacgttagacctaaaaccataaaaaccctagaagaaaacctaggcattaccattcaggacataggcatgggcaaggac

SEQ ID NO: 5135 - DNA, 75 bp, Homo sapiens
  source 1..75: mol_type = genomic DNA
gaattgaattgaatggaatggaatgcaatggaatctaatgaaacggaaaggaaaggaatggaatggaatggaatg

SEQ ID NO: 5136 - DNA, 69 bp, Homo sapiens
  source 1..69: mol_type = genomic DNA
gtaatggaatggaatggaaaggaatcgaaacgaaaggaatggagacagatggaatggaatggaacagag

SEQ ID NO: 5137 - DNA, 99 bp, Homo sapiens
  source 1..99: mol_type = genomic DNA
agagaaatgcaaatcaaaaccacaatggaataccatctcacgccagtcagaatggcaattattaaaaaatcacaacaattaatgatggcaaggctgtgg

SEQ ID NO: 5138 - DNA, 90 bp, Homo sapiens
  source 1..90: mol_type = genomic DNA
aacatacacaaatcaataaacgtaatccagcttataaacagaaccaaagacaaaaaccacatgattatctcaatagatgcggaaaaggcc

SEQ ID NO: 5139 - DNA, 56 bp, Homo sapiens
  source 1..56: mol_type = genomic DNA
taaacagaaccaaagacaaaaatcacatgattatctcaatagatgcagaaaaggcc

SEQ ID NO: 5140 - DNA, 76 bp, Homo sapiens
  source 1..76: mol_type = genomic DNA
aatggaatgcaatcgaatggaatggaatcgaacggaatggaataaaatggaagaaaactggcaagaaatggaatcg

SEQ ID NO: 5141 - DNA, 77 bp, Homo sapiens
  source 1..77: mol_type = genomic DNA
agataaaaagaacagcagccaaaatgacaaaagcaaaaagcaaaatcgtgttagagccaggtgtggtgatgtgtgct

SEQ ID NO: 5142 - DNA, 81 bp, Homo sapiens
  source 1..81: mol_type = genomic DNA
aggaaagttttcaatatgagaaagatacaaaccaacagaataagcaaactggataaacagaaaatacagagagagccaagg

SEQ ID NO: 5143 - DNA, 82 bp, Homo sapiens
  source 1..82: mol_type = genomic DNA
gcaatctcaggatacaaaatcaatgtgcaaaaatcacaagcattctcatacaccaataacagacaaacagagccaaatcatg

SEQ ID NO: 5144 - DNA, 103 bp, Homo sapiens
  source 1..103: mol_type = genomic DNA
agcattcatatcttgcagtgttgggaaagagtgagaggttgtgatgtcaagaaggataggtcagaagtggaaggtatgggggattgtgcctgctgtcatggct

SEQ ID NO: 5145 - DNA, 88 bp, Homo sapiens
  source 1..88: mol_type = genomic DNA
agcaacttcagcaaagtctcaggatacaaaatcaatgtgcaaaaatcacaagcattcttatacaccaataacagacaaacagagagcc

SEQ ID NO: 5146 - DNA, 88 bp, Homo sapiens
  source 1..88: mol_type = genomic DNA
agcaacttcagcaaagtctcaggatacaaaatcaatgtgcaaaaatcacaagcattcttatacaccaacaacagacaaacagagagcc

SEQ ID NO: 5147 - DNA, 107 bp, Homo sapiens
  source 1..107: mol_type = genomic DNA
taagccgataagcaacttcagcaaagtctcaggagacaaaatcaatgtgcaaaaaatcacaagcattcttatacactaataacagacaaacagagagccaaatcatg

SEQ ID NO: 5148 - DNA, 74 bp, Homo sapiens
  source 1..74: mol_type = genomic DNA
aacgtgacatacatacaaaaagtttttagagcaagtgaaattttagctgctatatgttaattggtggtaatccc

SEQ ID NO: 5149 - DNA, 86 bp, Homo sapiens
  source 1..86: mol_type = genomic DNA
tacgcaaatcgataaatgtaatccagcatataaacagaaccaaagacaaaaaccacatgattatctcaatagatgcagaaaaggcc

SEQ ID NO: 5150 - DNA, 68 bp, Homo sapiens
  source 1..68: mol_type = genomic DNA
gcaatcgaatggaatggaatcgaacggaatggaataaaatggaagaaaactggcaagaaatggaatcg

SEQ ID NO: 5151 - DNA, 72 bp, Homo sapiens
  source 1..72: mol_type = genomic DNA
ttgaatcgaatggaatcgaatggattggaaaggaatagaatggaatggaatggaattgactcaaatggaatg

SEQ ID NO: 5152 - DNA, 90 bp, Homo sapiens
  source 1..90: mol_type = genomic DNA
taaagaaaaacaaacaaacagaaatcaatgaaaatcccattcaaaggtcagcaacctcaaagactgaaggtagataagcccacaaggatg

SEQ ID NO: 5153 - DNA, 77 bp, Homo sapiens
  source 1..77: mol_type = genomic DNA
gtcatatttgggatttatcatctgtttctattgttgttgttttagtacacacaaagccacaataaatattctaggct

SEQ ID NO: 5154 - DNA, 77 bp, Homo sapiens
  source 1..77: mol_type = genomic DNA
aaaagtacagaagacaacaaaaaatgagagagagaaagataacagactatagcagcattggtgatcagagccaccag

SEQ ID NO: 5155 - DNA, 87 bp, Homo sapiens
  source 1..87: mol_type = genomic DNA
aacccacaaagacaacagaagaaaagacaacagtagacaaggatgtcaaccacattttggaagagacaagtaatcaaacacatggca

SEQ ID NO: 5156 - DNA, 105 bp, Homo sapiens
  source 1..105: mol_type = genomic DNA
aaagaccgaaacaacaacagaaacagaaacaaacaacaataagaaaaaatgttaagcaaaacaaatgattgcacaacttacatgattactgagtgttctaatggt

SEQ ID NO: 5157 - DNA, 80 bp, Homo sapiens
  source 1..80: mol_type = genomic DNA
aatcagtaaacgtaatacagcatataaacagaaccaaagacaaaaaccacatgattatctcaatagatgcagaaaaggcc

SEQ ID NO: 5158 - DNA, 97 bp, Homo sapiens
  source 1..97: mol_type = genomic DNA
aagcaacttcagcaaagtctcaggacacaaaatcaatatgcgaaaatcacaagcattcctatacaccaataatagacaaacagagagccaaatcatg

SEQ ID NO: 5159 - DNA, 88 bp, Homo sapiens
  source 1..88: mol_type = genomic DNA
agcaacttcagcaaaatctcaggatacaaaatcaatgtacaaaaatcacaagcattcttatacaccaacaacagacaaacagagagcc

SEQ ID NO: 5160 - DNA, 104 bp, Homo sapiens
  source 1..104: mol_type = genomic DNA
taatgcaaactaaaacgacaatgagatatcaatacataactaccagaaaggctaacaaaaaaacagtcataacacaccaaaggctgatgagtgaggatgtgcag

SEQ ID NO: 5161 - DNA, 88 bp, Homo sapiens
  source 1..88: mol_type = genomic DNA
agcaacttcagcaaagtctcaggatacaaaatcgatgtgcaaaaatcacaagcattcttatacaccaataacaggcaaacagagagcc

SEQ ID NO: 5162 - DNA, 93 bp, Homo sapiens
  source 1..93: mol_type = genomic DNA
gatatataaacaagaaaacaactaatcacaactcaatatcaaagtgcaatgatggtgcaaaatgcaagtatggtggggacagagaaaggatgc

SEQ ID NO: 5163 - DNA, 74 bp, Homo sapiens
  source 1..74: mol_type = genomic DNA
aagacagaacactgaaactcaacagagaagtaacaagaacacctaagacaaggaaggagagggaaggcaggcag

SEQ ID NO: 5164 - DNA, 75 bp, Homo sapiens
  source 1..75: mol_type = genomic DNA
taagacacatagaaaacataaagcaaaatggcagatgtaaatgcaacctatcaatcaaaacattacgaatggctt

SEQ ID NO: 5165 - DNA, 95 bp, Homo sapiens
  source 1..95: mol_type = genomic DNA
tgaaacaaatgataatgaaaatacaacataccaaacatacgagatacagtaaaagcagtactaagatgcaagtatatattgctacaagtgcctac

SEQ ID NO: 5166 - DNA, 135 bp, Homo sapiens
  source 1..135: mol_type = genomic DNA
aatgtaatccagcatataaacagagccaaagacaaaaaccacatgattatctcaatagatgcagaaaaagcctttgacaaaattcaacaacccttcatgctaaaaactctcaataaattaggtattgatgggacg

SEQ ID NO: 5167 - DNA, 87 bp, Homo sapiens
  source 1..87: mol_type = genomic DNA
acaaaattgatagaccactagcaagactaataaagaagaaaagagagaagaatcattaccattcaggacataggcatgggcaaggac

SEQ ID NO: 5168 - DNA, 85 bp, Homo sapiens
  source 1..85: mol_type = genomic DNA
aaggattcgaatggaatgcaatcgaatggaatggaatcgaacggaatggaataaaatggaagaaaactggcaagaaatggaatcg

SEQ ID NO: 5169 - DNA, 75 bp, Homo sapiens
  source 1..75: mol_type = genomic DNA
gatcatcagagaaacagagaaatgcaaattaaaaccacaatgagatactatctccacacaagtcagaatggctat

SEQ ID NO: 5170 - DNA, 95 bp, Homo sapiens
  source 1..95: mol_type = genomic DNA
atcaaaagaaaagcaacctaacaaatacgggaagaatatttgaatagacatttcacaggaaaagatatatgaatggccaaaaagcaaatgaaaag

SEQ ID NO: 5171 - DNA, 58 bp, Homo sapiens
  source 1..58: mol_type = genomic DNA
aacagcaatgacaatgatcagtaacaacaagacttttaactttgaaaaaatcaggacc

SEQ ID NO: 5172 - DNA, 91 bp, Homo sapiens
  source 1..91: mol_type = genomic DNA
aagagcctgaatagctaaagtgatcataagcaaaaagaacaaagtcggaagcatcacattacctgacttcaaactatactcaaaggctatg

SEQ ID NO: 5173 - DNA, 101 bp, Homo sapiens
  source 1..101: mol_type = genomic DNA
actcaggaaaaataacgaatccaactcacaggagaaagaagtacaaaccagaaaccaatttcaaattacaaggaccagaatactcatgttggctggccagt

SEQ ID NO: 5174 - DNA, 78 bp, Homo sapiens
  source 1..78: mol_type = genomic DNA
ttgaccagaacacattacacaatgctaatcaactgcaaaggagaatatgaacagagaggaggacatggatattttgtg

SEQ ID NO: 5175 - DNA, 92 bp, Homo sapiens
  source 1..92: mol_type = genomic DNA
aacatatggaaaaaaactcaacatcactgatcattagagaaatgcaaatcaaaaccacaatgagataccatctcacgccagtcagaatggcg

SEQ ID NO: 5176 - DNA, 88 bp, Homo sapiens
  source 1..88: mol_type = genomic DNA
agcaacttcagcaaagactcaggatacaaaatcaatgtgcaaaaatcacaagcattcttatacaccaataacagacagagagccaaat

SEQ ID NO: 5177 - DNA, 84 bp, Homo sapiens
  source 1..84: mol_type = genomic DNA
tgggatatgggtgaaagaacaagtttgcagaaaagatacagtgaattatggaccatgagttcgggaaagaagggtaggactgcg

SEQ ID NO: 5178 - DNA, 79 bp, Homo sapiens
  source 1..79: mol_type = genomic DNA
agcagtgcaagaacaacataacatacaagtaaacaaacacatggggccaggtaataaaaagtcaggctcaagaggtcag

SEQ ID NO: 5179 - DNA, 91 bp, Homo sapiens
  source 1..91: mol_type = genomic DNA
aaggaaaagtaaaaggaacttaacaccttcaagaaaagacagacaaataacaaaacagcagtttgatagaatgagatatcaggggatggca

SEQ ID NO: 5180 - DNA, 96 bp, Homo sapiens
  source 1..96: mol_type = genomic DNA
gctagttcaacatatgcaaatcaataaacgtaatccatcacataaacagaaccaatgacaaaaaccacgattatctcaatagatgcagaaaaggcc

SEQ ID NO: 5181 - DNA, 76 bp, Homo sapiens
  source 1..76: mol_type = genomic DNA
aacatcactgatcattagaaacacacaaatcaaaaccacaataagataccatctaacaccagtcacaatggctatt

SEQ ID NO: 5182 - DNA, 80 bp, Homo sapiens
  source 1..80: mol_type = genomic DNA
agagcatccacaaggcccaattcaaagaatctgaaataatgtattgttactgcaacagttgtgagtaccagtggcatcag

SEQ ID NO: 5183 - DNA, 70 bp, Homo sapiens
  source 1..70: mol_type = genomic DNA
ggaataacaacaacaacaaccaaaagacatatagaaaacaaacagcacgatggcagatgtaaagcctacc

SEQ ID NO: 5184 - DNA, 103 bp, Homo sapiens
  source 1..103: mol_type = genomic DNA
aaacgcagaaacaaatcaacgaaagaacgaagcaatgaaagacaaagcaacaaaagaatggagtaagaaagcacactccacaaagtggaagcaggctgggaca

SEQ ID NO: 5185 - DNA, 88 bp, Homo sapiens
  source 1..88: mol_type = genomic DNA
agcaacttcagcaaagtctcaggatacaaaatcaatgtgcaaaaatcacaagcattcctatacaccaacaacagacaaacagagagcc

SEQ ID NO: 5186 - DNA, 88 bp, Homo sapiens
  source 1..88: mol_type = genomic DNA
agcaacttcagcaaagtctcaggatacaaaatcaatgggaaaaaatcacaagcattcctatacatcaataacagacaaacagagagcc

SEQ ID NO: 5187 - DNA, 88 bp, Homo sapiens
  source 1..88: mol_type = genomic DNA
acacatttcaaggaaggaaacaagaacagacagaaacacaacatacttcatgaaaccacattttagcatcctggccgagtattcatca

SEQ ID NO: 5188 - DNA, 88 bp, Homo sapiens
  source 1..88: mol_type = genomic DNA
agcaacttcagcaaagtctcaggacacaaaatcaatgtgcaaaaatcacaagcattcttatacaccaataacagacaaacagagagcc

SEQ ID NO: 5189 - DNA, 109 bp, Homo sapiens
  source 1..109: mol_type = genomic DNA
tattttaccagattattcaagcaatatatagacagcttaaagcatacaagaagacatgtatagatttacatgcaaacactgcaccactttacataagggacttgagcac

SEQ ID NO: 5190 - DNA, 89 bp, Homo sapiens
  source 1..89: mol_type = genomic DNA
cccaacttcaaattatactacaaggctacagtaatcaaaaaagcatagtactattacaaaaacagacacacaggccaatggaatacaat

SEQ ID NO: 5191 - DNA, 96 bp, Homo sapiens
  source 1..96: mol_type = genomic DNA
agaaaggattcgaatggaatgaaaaagaattgaatggaatagaacagaatggaatcaaatcgaatgaaatggaatggaatagaaaggaatggaatg

SEQ ID NO: 5192 - DNA, 86 bp, Homo sapiens
  source 1..86: mol_type = genomic DNA
gtttacagtcaagtgtacaaacagaatataagcaaacaaaagagaacatatacttacaaactatgctaagtgccatgaaggaaaag

SEQ ID NO: 5193 - DNA, 92 bp, Homo sapiens
  source 1..92: mol_type = genomic DNA
aagagtattgaagttgacatatctagactgatcaagaacaaagacaaaaggtacagattatcaagaaaatgagcgggcaaagcaagatggcc

SEQ ID NO: 5194 - DNA, 102 bp, Homo sapiens
  source 1..102: mol_type = genomic DNA
agtagaattgcaattgcaaatttcacacatatactcacacacaagtacacacatccacttttacaactaaaaaaactagcacccaggacaggtgcagtggct

SEQ ID NO: 5195 - DNA, 147 bp, Homo sapiens
  source 1..147: mol_type = genomic DNA
tgaatgctatagagcagtaaaaacaaataaatgaactacattacagctacttacaaccatatgaaagaatataaccataacaatgatgagtggacaaaagctaagtgtgaaagaatgcatagtgctacagcagccaacatttacagc

SEQ ID NO: 5196 - DNA, 74 bp, Homo sapiens
  source 1..74: mol_type = genomic DNA
gaatggaatcaaatagaatggaatcgaaacaaatggaatggaatggaatgggagctgagattgtgtcactgcac

SEQ ID NO: 5197 - DNA, 86 bp, Homo sapiens
  source 1..86: mol_type = genomic DNA
taaaagtgtgctcaacatcattgatcatcagagaaatgcaaatcaaaactacaatgagatatcatctcatcccagtcaaagtggct

SEQ ID NO: 5198 - DNA, 61 bp, Homo sapiens
  source 1..61: mol_type = genomic DNA
tcagaccatagcagataacatgcacattagcaatacgattgccatgacagagtggttggtg

SEQ ID NO: 5199 - DNA, 62 bp, Homo sapiens
  source 1..62: mol_type = genomic DNA
acaaacaatccaattcgaaaatgggcaagatatttcaccaaagacatgagctgatatttcac

SEQ ID NO: 5200 - DNA, 98 bp, Homo sapiens
  source 1..98: mol_type = genomic DNA
aggaaaaacaacaacaacaacaggaaaacaacctcagtatgaagacaagtacattgatttattcaacatttactgatcacttttcaggtggtaggcag

SEQ ID NO: 5201 - DNA, 106 bp, Homo sapiens
  source 1..106: mol_type = genomic DNA
aacaaaacaaaaacccaactcaataacaagaagacaaacaacccaatttaaaatgagcaaagaacttgataaacatgtctccaaagaagatacggccaaagagcac

SEQ ID NO: 5202 - DNA, 90 bp, Homo sapiens
  source 1..90: mol_type = genomic DNA
atacaactaaagcaaatataagcaactaaagcaacagtacaactaaagcaaaacagaacaagactgccagggcctagaaaagccaagaac

SEQ ID NO: 5203 - DNA, 95 bp, Homo sapiens
  source 1..95: mol_type = genomic DNA
aacaacaacaacaacaggaaaacaacctcagtatgaagacaagtacattgatttattcaacatttactgatcacttttcaggtggtaggcagacc

SEQ ID NO: 5204 - DNA, 86 bp, Homo sapiens
  source 1..86: mol_type = genomic DNA
agagagtattcatcatgaggagtattactggacaaataattcacaaacgaacaaaccaaagcgatcatctttgtactggctggcta

SEQ ID NO: 5205 - DNA, 69 bp, Homo sapiens
  source 1..69: mol_type = genomic DNA
agtaaatcaccataaagaaggtaagagttcattcacaaaaacaacaaactgaagaatcaggccatagta

SEQ ID NO: 5206 - DNA, 86 bp, Homo sapiens
  source 1..86: mol_type = genomic DNA
aaaatagaatgaaagagaatcaaatggaattgaatcgaatggaatcgaatggattggaaaggaatagaatggaatggaatggaatg

SEQ ID NO: 5207 - DNA, 79 bp, Homo sapiens
  source 1..79: mol_type = genomic DNA
aaaagatgcaaaagtagcaaatgcaatgttaaaacaagcaaagaaagaatcaggtggaccacatagtgcagtgcttctc

SEQ ID NO: 5208 - DNA, 62 bp, Homo sapiens
  source 1..62: mol_type = genomic DNA
ttcacagcagcattacgcacaatagccagaaggtgggaacagacaaaatgccttttgatggg

SEQ ID NO: 5209 - DNA, 74 bp, Homo sapiens
  source 1..74: mol_type = genomic DNA
ccataacacaattaaaaacaacctaaatgtctaatagaagaacactgttcagaccgggcatggtggcttatacc

SEQ ID NO: 5210 - DNA, 88 bp, Homo sapiens
  source 1..88: mol_type = genomic DNA
tggatttcagatatttaacacaaaatagtcaaagcagataaatactagcaacttatttttaatgggtaacatcatatgttcgtgcctt

SEQ ID NO: 5211 - DNA, 138 bp, Homo sapiens
  source 1..138: mol_type = genomic DNA
atcattgaatgcaatcacatggaatcatcacagaatggaatcgtacggaatcatcatcgaatggaattgaatggaatcatcaattggactcgaatggaaacatcaaatggaatcgattggaagtgtcgaatggactcg

SEQ ID NO: 5212 - DNA, 99 bp, Homo sapiens
  source 1..99: mol_type = genomic DNA
agaaacagccagaaaacaattattacctacagcattaaaactattcaaatgacagcatatttttcagcagaaatcatgaaggccagaaggacgtgtcat

SEQ ID NO: 5213 - DNA, 87 bp, Homo sapiens
  source 1..87: mol_type = genomic DNA
aaaatgatcatgagaaaattcagcaacaaaaccatgaaattgcaaagatattacttttgggatggaacagagctggaaggcaaagag

SEQ ID NO: 5214 - DNA, 76 bp, Homo sapiens
  source 1..76: mol_type = genomic DNA
aaccactgctcaaggaaataagagagaacacaaacaaatgaaaaaacattccatgctcatggataggaagaatcag

SEQ ID NO: 5215 - DNA, 77 bp, Homo sapiens
  source 1..77: mol_type = genomic DNA
tactctcagaagggaagcagatattcagcataaatcatattgtttgtacaaagagtctgggcatggtgaatgacact

SEQ ID NO: 5216 - DNA, 109 bp, Homo sapiens
  source 1..109: mol_type = genomic DNA
tatagttgaatgaacacacatacacacacacatgccacaaaacaaaaacaaagttatcctcacacacaggatagaaaccaaaccaaatcccaacacatggcaagatgat

SEQ ID NO: 5217 - DNA, 95 bp, Homo sapiens
  source 1..95: mol_type = genomic DNA
gctcaaagaaatcagaaatgacacaagcaaatggaaaaacatgccatgttcatgaatatgaagaatcaatattgttaaaatggccatactgctca

SEQ ID NO: 5218 - DNA, 67 bp, Homo sapiens
  source 1..67: mol_type = genomic DNA
ggatacaaaatcaatgtacaaaaatcacaagcattcttatacaccaataacagacaaacagagagcc

SEQ ID NO: 5219 - DNA, 88 bp, Homo sapiens
  source 1..88: mol_type = genomic DNA
agcaacttcagcaaagtctcaggatacaaaatcaatgtacaaaaatcacaagcattcttatacaccaacaacagacaaacagagagcc

SEQ ID NO: 5220 - DNA, 83 bp, Homo sapiens
  source 1..83: mol_type = genomic DNA
aggagaatagcagtagaatgacaaaattagattttcacatgaaacttgatgacagtgtaggaaatggactgaaaggacaagac

SEQ ID NO: 5221 - DNA, 88 bp, Homo sapiens
  source 1..88: mol_type = genomic DNA
agcaacttcagcaaagtctcgggatacaaaatcaatgtgcaaaaatcacaagcattcctatacaccaataacaggcaaacagagagcc

SEQ ID NO: 5222 - DNA, 129 bp, Homo sapiens
  source 1..129: mol_type = genomic DNA
aagttcaaacatcagtattaaccttgaacatcaatggcctacatgcatcacttaaaacatacagacaggcaaattgggttaagaaaacaaacaagcaaacaaaacatgttccaaacatttgttggctat

SEQ ID NO: 5223 - DNA, 95 bp, Homo sapiens
  source 1..95: mol_type = genomic DNA
aagaaacaatcaaaaggaagtgctagaaataaaacacactgtaatagaaaagaagaatgccttatgggcttatcaatagactagacatggccagg

SEQ ID NO: 5224 - DNA, 139 bp, Homo sapiens
  source 1..139: mol_type = genomic DNA
aaagaaagacagagaacaaacgtaattcaagatgactgattacatatccaagaacattagatggtcaaagactttaagaaggaatacattcaaaggcaaaaagtcacttactgattttggtggagtttgccacatggac

SEQ ID NO: 5225 - DNA, 88 bp, Homo sapiens
  source 1..88: mol_type = genomic DNA
agcaacttcagcaaagtttcaggatacaaaatcaatgtgcaaaaatcacaagcattcttatacaccaacaacagacaaacagagagcc

SEQ ID NO: 5226 - DNA, 71 bp, Homo sapiens
  source 1..71: mol_type = genomic DNA
agaatcaaatggaattgaatcgaatggaatcgaatggattggaaaggaatagaatggaatggaatggaatg

SEQ ID NO: 5227 - DNA, 106 bp, Homo sapiens
  source 1..106: mol_type = genomic DNA
aaacagaaccacagatatctgtaaaggattacactatagtattcaacagagtatggaacagagtatagtattcaacagagtatgcaaagaaactaaggccagaaag

SEQ ID NO: 5228 - DNA, 83 bp, Homo sapiens
  source 1..83: mol_type = genomic DNA
aaaaaatgttcaacatcactagtcagcagagaaatgcaaatcaaaatcacaatgagataacttctcacaccagacagcatggc

SEQ ID NO: 5229 - DNA, 87 bp, Homo sapiens
  source 1..87: mol_type = genomic DNA
gaatccatgttcatagcacaacaaccaaacagaagaaatcactgtgaaataagaaacaaagcaaaacacagatgtcgacacatggca

SEQ ID NO: 5230 - DNA, 68 bp, Homo sapiens
  source 1..68: mol_type = genomic DNA
aggatacaaaatcaaagtgcaaaaatcacaagcattcttatacaccaataacagacaaacagagagcc

SEQ ID NO: 5231 - DNA, 101 bp, Homo sapiens
  source 1..101: mol_type = genomic DNA
aacagatttaaacaaaccaacaagcaaaaaacgaacaactccattcaaacatggacaaaagacacgaacagacacttttcaaagaagacatacatgtggcc

SEQ ID NO: 5232 - DNA, 87 bp, Homo sapiens
  source 1..87: mol_type = genomic DNA
aaagacaatatacaaatggccaataagcacatgaaaagacgctcaacatccttagtcgttaaggcaatgcaaatcaaaaccacaatg

SEQ ID NO: 5233 - DNA, 82 bp, Homo sapiens
  source 1..82: mol_type = genomic DNA
taaacaacgagaacacatgaacacaaagaggggaacaacagacaccaagaccttcttgagggtggaggatgggaggagggag

SEQ ID NO: 5234 - DNA, 92 bp, Homo sapiens
  source 1..92: mol_type = genomic DNA
ggttcaacttacaatattttgacttgacaacagtgcaaaagcaatacacgattagtagaaacacacttccaatgcccataggaccattctgc

SEQ ID NO: 5235 - DNA, 88 bp, Homo sapiens
  source 1..88: mol_type = genomic DNA
agcaacttcagcaaagtctcaggatacaaaatcaatgagcaaaaatcacaagcattcttacacaccaataacagacaaacagagagcc

SEQ ID NO: 5236 - DNA, 67 bp, Homo sapiens
  source 1..67: mol_type = genomic DNA
aatccagcatataaacagaaccaaagacaaaaaccacatgattatctcaatagatgcagaaaaggcc

SEQ ID NO: 5237 - DNA, 95 bp, Homo sapiens
  source 1..95: mol_type = genomic DNA
tgaaaatacaaatgaccatgcaagtaattccgcagggagagagcggatatgaacaaacagaagaaatcagatgggatagtgctggcgggaagtca

SEQ ID NO: 5238 - DNA, 67 bp, Homo sapiens
  source 1..67: mol_type = genomic DNA
gcaaatgattataagtgctgttatagaaacattcaaagaccagaaaaggaccacaatggctgaccac

SEQ ID NO: 5239 - DNA, 90 bp, Homo sapiens
  source 1..90: mol_type = genomic DNA
agtcaataacaagaagacaaacaacccaattacaaaatgggatatgaatttaatagatgttactccaaggaagatacacaaatggccaac

SEQ ID NO: 5240 - DNA, 83 bp, Homo sapiens
  source 1..83: mol_type = genomic DNA
atggttaaaactcaacaatgaaaacacaaacagcgcaatttaaaaatgggcaaaatgacaggccagacccagtggctcatgcg

SEQ ID NO: 5241 - DNA, 102 bp, Homo sapiens
  source 1..102: mol_type = genomic DNA
taactactcacagaactcaacaaaacactatacatgcatttaccagtttattataaagatacaagtcaggaacagccaaatggaagaaatgtaaatggcaag

SEQ ID NO: 5242 - DNA, 98 bp, Homo sapiens
  source 1..98: mol_type = genomic DNA
aacagaccataaataaacacagaagacacacgagtgtaaagtcagtgccccgctgcgaattaaatcggggtgatgtgatggcgagtgagtgggtagtt

SEQ ID NO: 5243 - DNA, 69 bp, Homo sapiens
  source 1..69: mol_type = genomic DNA
gaatagaatagaatggaatcatcgaatggaatcgaatggaatcatcatgatatggaattgagtggaatc

SEQ ID NO: 5244 - DNA, 81 bp, Homo sapiens
  source 1..81: mol_type = genomic DNA
ggaatctataatacagctgtttatagccaagcactaaatcatatgatacagaaaacaaatgcagatggtttgaagggtggg

SEQ ID NO: 5245 - DNA, 90 bp, Homo sapiens
  source 1..90: mol_type = genomic DNA
aagatagagttgaaacagtggacaattaaagagtaatttggaagaatggtgaaattacagccatgctttgaatcaggcgggttcactggc

SEQ ID NO: 5246 - DNA, 80 bp, Homo sapiens
  source 1..80: mol_type = genomic DNA
tgaaaagaagaatgaccataagcaagcagatgaaaaacaaaacagaatttttacagacgtcttggactgatatcttgggc

SEQ ID NO: 5247 - DNA, 82 bp, Homo sapiens
  source 1..82: mol_type = genomic DNA
aggaatctataatacagctgtttatagccaagcactaaatcatatgatacagaaaacaaatgcagatggtttgaagggtggg

SEQ ID NO: 5248 - DNA, 84 bp, Homo sapiens
  source 1..84: mol_type = genomic DNA
aggaaaagaaagaaatagaaaatgcgaaatggtaagaaaaaacagcataataaacatttgtatggtgttgatggacaatgcatt

SEQ ID NO: 5249 - DNA, 122 bp, Homo sapiens
  source 1..122: mol_type = genomic DNA
taacagtaccaaaaaacagtcataatcttcaagagcttaaatttagcatgaaaggaagacattcatcaaagaatcacacaaaggaatgtaaaattaaatggagattagtgccaggaaagagc

SEQ ID NO: 5250 - DNA, 82 bp, Homo sapiens
  source 1..82: mol_type = genomic DNA
gcaaaacacaaacaacgccataaaaaactgggcaaaggatatgaacagacatttttcaaaacaaaacatacttatggccaac

SEQ ID NO: 5251 - DNA, 100 bp, Homo sapiens
  source 1..100: mol_type = genomic DNA
aacaaaattgaacaacatgcaaagaaacataaacgaagcaatgaaagtgtgcagatccactgaaatgaaagtgctgtccagagtgggagccagctcgaga

SEQ ID NO: 5252 - DNA, 113 bp, Homo sapiens
  source 1..113: mol_type = genomic DNA
gaatggaatcaacatcaaacggaatcaaacggaattatcgaatggaatcgaagagaatcatcgaatggccacgaatggaatcatctaatggaatggaatggaataatccatgg

SEQ ID NO: 5253 - DNA, 137 bp, Homo sapiens
  source 1..137: mol_type = genomic DNA
tacaagaaaatcacagtaacatttataaaacacagaagtgtgaacacacagctattgaccttgaaaacagtgaaagagggtcagctgtagaactaagacataagcaaagtttttcaatcaagaatacatgggtggcc

SEQ ID NO: 5254 - DNA, 87 bp, Homo sapiens
  source 1..87: mol_type = genomic DNA
aagaattggacaaaacacacaaacaaagcaaggaaggaatgaaaggatttgttgaaaatgaaagtacactccacagtgtgggagcag

SEQ ID NO: 5255 - DNA, 92 bp, Homo sapiens
  source 1..92: mol_type = genomic DNA
acagttaacaaaaaccgaacaatctaattacgaaatgaacaaaagatatgaacagacatttcacccgagagtatacaggggccaggcatggt

SEQ ID NO: 5256 - DNA, 83 bp, Homo sapiens
  source 1..83: mol_type = genomic DNA
aaacgcacaaacaaagcaaggaaagaatgaagcaacaaaagcagagatttattgaaaatgaaaaatacactccacagggtggg

SEQ ID NO: 5257 - DNA, 86 bp, Homo sapiens
  source 1..86: mol_type = genomic DNA
caccatgagtcattaggtaaatgcaaatcaaaaccacaatgaaatacttcacacccatgaagatggctataataaaaaaacagaca

SEQ ID NO: 5258 - DNA, 88 bp, Homo sapiens
  source 1..88: mol_type = genomic DNA
agcaacttcagcaaagtctcaggagacaaaatcaatgtacaaaaatcacaagcattcttatacaccaataacagacaaacagagagcc

SEQ ID NO: 5259 - DNA, 97 bp, Homo sapiens
  source 1..97: mol_type = genomic DNA
tgacatgcaagaaataaggaagtgcaaaaacaaacaaacaaacaacaacaacaacaacaacaacaacaacaaaaaacagtcccaaaaggatgggcag

SEQ ID NO: 5260 - DNA, 80 bp, Homo sapiens
  source 1..80: mol_type = genomic DNA
agacttgaaaagcacagacaacgaaagcaaaaatggacaaatggaatcacatcaagctaaaaggttttgcatggcaaagg

SEQ ID NO: 5261 - DNA, 83 bp, Homo sapiens
  source 1..83: mol_type = genomic DNA
gcaaaagaaacaatcagtagagtaaacagacaactcatagaatgcaagaaaatcatcgcaatctgtacatccaacaaagggct

SEQ ID NO: 5262 - DNA, 86 bp, Homo sapiens
  source 1..86: mol_type = genomic DNA
acaaaatcaaactaacctcgataagaatgcaagtgaatcaaaatgagtttcaaggggttgtggctagtacacgctttctacagctg

SEQ ID NO: 5263 - DNA, 96 bp, Homo sapiens
  source 1..96: mol_type = genomic DNA
acaaaccactgctcaaggaaataaggacacaaacaaatggaacaacattccgtgctcatggataggaagaatcaatatcgtgaaaatggccatact

SEQ ID NO: 5264 - DNA, 86 bp, Homo sapiens
  source 1..86: mol_type = genomic DNA
gaacgatttatcactgaaaattaatactcatgcaagtagtaaacgaatgtaatgaccatgataaggagacggacggtggtgatagt

SEQ ID NO: 5265 - DNA, 73 bp, Homo sapiens
  source 1..73: mol_type = genomic DNA
agcagaagaaataactgaaatcagagtgaaactgaatcaaattgagatgcaaaaatacatacgaaatggccag

SEQ ID NO: 5266 - DNA, 91 bp, Homo sapiens
  source 1..91: mol_type = genomic DNA
tgaatagacacacagaccaatggaacagaatagagaacacagaataaatctgcacacttatagccagctgatttttgacaaatttgccaag

SEQ ID NO: 5267 - DNA, 86 bp, Homo sapiens
  source 1..86: mol_type = genomic DNA
agcaacttcagcagtctcagtatacaaaaacaatgtgcaaaaatcacaagcattcctatatgccaataacagacaaacagagagcc

SEQ ID NO: 5268 - DNA, 61 bp, Homo sapiens
  source 1..61: mol_type = genomic DNA
accaatcaagaaaacaatgcaacccacagagaatggacaaaagcaaggcaggacaatggct

SEQ ID NO: 5269 - DNA, 89 bp, Homo sapiens
  source 1..89: mol_type = genomic DNA
gccacaattttgaaacaaccataataatgagaatacacaagacaactccaataatgtgggaagacaaactttgcaattcacatcatggc

SEQ ID NO: 5270 - DNA, 82 bp, Homo sapiens
  source 1..82: mol_type = genomic DNA
gaaaatgaacaatatgaacaaacaaacaaaattactacccttacgaaagtacgtgcattctagtatggtgacaaaaaggaaa

SEQ ID NO: 5271 - DNA, 85 bp, Homo sapiens
  source 1..85: mol_type = genomic DNA
tatgcaaatcaataaacataatccatcacataaacagaaacaaagacaaaatgacatgattatctcaatagatgcagaaaaggcc

SEQ ID NO: 5272 - DNA, 133 bp, Homo sapiens
  source 1..133: mol_type = genomic DNA
cacccatctgtaggaccaggaagcctgatgtgggagagaacagcaggctaaatccagggttggtctctacagcagagggaatcacaagcctgttagcaagtgaagaaccaacactggcaagagtgtgaaggcc

SEQ ID NO: 5273 - DNA, 80 bp, Homo sapiens
  source 1..80: mol_type = genomic DNA
aggatacaaaatcaatgtacaaaaatcacaaacattcttatacaccaacaacagacaaacagagagccaaatcatgggtg

SEQ ID NO: 5274 - DNA, 96 bp, Homo sapiens
  source 1..96: mol_type = genomic DNA
aggaaaatgcaaatcagaacgactataacacaccatctcaaactcgttaggatggctattatcaaaaagtcaagagataacaaatgtgggcaaggg

SEQ ID NO: 5275 - DNA, 91 bp, Homo sapiens
  source 1..91: mol_type = genomic DNA
gtaacaaaacagactcatagaccaatagaacagaatagagaattcagaaataagactgcacttctatgaccatgtgatcttagacaaacct

SEQ ID NO: 5276 - DNA, 91 bp, Homo sapiens
  source 1..91: mol_type = genomic DNA
aaaggaaaactacaaaacactgctgaaagaaatcattgacaacacaaacaaatggaaacacatcccaagatcatgggtgggtggaatcaat

SEQ ID NO: 5277 - DNA, 121 bp, Homo sapiens
  source 1..121: mol_type = genomic DNA
acacacataccaacagaacatgacaaaagaacaaaaccagccgcatgcatactcgatggagacaaaggtaacactgcagaatggtgaaggaagaacagtcattttaatgacagtgttggct

SEQ ID NO: 5278 - DNA, 95 bp, Homo sapiens
  source 1..95: mol_type = genomic DNA
aactaagacaacagattgatttacactactattttcacacagccaaaaatatcactatggcaatcgtcaaaaggtcaattcaaagatgggacagt

SEQ ID NO: 5279 - DNA, 113 bp, Homo sapiens
  source 1..113: mol_type = genomic DNA
gatcagcttagaatacaatggaacagaacagattagaacaatgtgattttattaggggccacagcactgttgactcaagtacaagttctgactcatgtagaactaacactttt

SEQ ID NO: 5280 - DNA, 74 bp, Homo sapiens
  source 1..74: mol_type = genomic DNA
gaatggaatcaaatcgaatgaaatggaatggaatagaaaggaatggaatgaaatggaatggaaaggattcgaat

SEQ ID NO: 5281 - DNA, 86 bp, Homo sapiens
  source 1..86: mol_type = genomic DNA
aaatgaacaaaactagaggaatgacattacctgacttcaaattatactacagagctatagtaaccaaaacagcatggtacaggcat

SEQ ID NO: 5282 - DNA, 91 bp, Homo sapiens
  source 1..91: mol_type = genomic DNA
ggacaacatacacaaatcagtcaagatacatcatttcaacagaatgaaagacaaaaaccatttgatcacttcaatcgatgatgaaaaagca

SEQ ID NO: 5283 - DNA, 85 bp, Homo sapiens
  source 1..85: mol_type = genomic DNA
aacttcagcaaattctcaggatacaaaatcaatgtgcaaaaaccacaagcattcctatacaccaataatagacagtgagccaaat

SEQ ID NO: 5284 - DNA, 79 bp, Homo sapiens
  source 1..79: mol_type = genomic DNA
tatgactttcacaaattacagaaaaagacacccatttgacaagggaactgaaggtggtgaagacatactggcaggctac

SEQ ID NO: 5285 - DNA, 70 bp, Homo sapiens
  source 1..70: mol_type = genomic DNA
aacagcaatagacacaaagtcagcacttacagtacaaaaactaatggcaaaagcacatgaagtgggacat

SEQ ID NO: 5286 - DNA, 76 bp, Homo sapiens
  source 1..76: mol_type = genomic DNA
tgtaacactgcaaaccataaaaaccgtagaagaaaacctagacaatactattcaggacataggcatgggcaaagac

SEQ ID NO: 5287 - DNA, 83 bp, Homo sapiens
  source 1..83: mol_type = genomic DNA
gaagaagaaaaaacatggatatacaatgtcaacagaaatcaaggagaaacggaatttcaccaatcaatttagtgatctgggtt

SEQ ID NO: 5288 - DNA, 106 bp, Homo sapiens
  source 1..106: mol_type = genomic DNA
aaaacacacaaacatacatgtggatgcacatataaacatgcacatacacacacacataaatgcacaaacacacttaacacaagcacacatgcaaacaaacacatgg

SEQ ID NO: 5289 - DNA, 83 bp, Homo sapiens
  source 1..83: mol_type = genomic DNA
tagaaggaatttgatacatgctcagaaatacaggcaaaggaagtaggtgcctgccagtgaacacaggggaactatggctccta

SEQ ID NO: 5290 - DNA, 131 bp, Homo sapiens
  source 1..131: mol_type = genomic DNA
tgactaaacagagttgaacaagaacaaaaagcaaatttgcagaaatgaaatacatactaattgaaagtccatggacaggctcaacagatgatatagatacagctaaagagataattagtgaaatggatcag

SEQ ID NO: 5291 - DNA, 101 bp, Homo sapiens
  source 1..101: mol_type = genomic DNA
aagtaataagactgaattagtaatacaaagtgtctcaacaaagaaaattgcgggactgttcatgctcatggacaggaagaatcaatatcatgaaaatggcc

SEQ ID NO: 5292 - DNA, 106 bp, Homo sapiens
  source 1..106: mol_type = genomic DNA
acagacagagatttaaaacaataaacaagcagtaagcaaacacagataacaaaatgacatgatccaacaaatactcagaaggagacttagaaatgaattgagggtc

SEQ ID NO: 5293 - DNA, 85 bp, Homo sapiens
  source 1..85: mol_type = genomic DNA
agaaaaaaacaaacagcccattaaaaggtagacaaaggacatgaacacttttcaaaagaagacatacatgtggccaaacagcatg

SEQ ID NO: 5294 - DNA, 79 bp, Homo sapiens
  source 1..79: mol_type = genomic DNA
aaaaatgaccagagcaatagaatgcattgaccagataaagaccttcacgtatgttgaactaaaatgtgtggtgcaggtg

SEQ ID NO: 5295 - DNA, 81 bp, Homo sapiens
  source 1..81: mol_type = genomic DNA
aatcagtctagatcttaaaggaacaccagagggagtatttaaatgtgcccaataagcaagaattatggtgatgtggaagta

SEQ ID NO: 5296 - DNA, 71 bp, Homo sapiens
  source 1..71: mol_type = genomic DNA
gaatggaatggaaaggaatcgaaacgaaaggaatggagacagatggaatggaatggaacagagagcaatgg

SEQ ID NO: 5297 - DNA, 107 bp, Homo sapiens
  source 1..107: mol_type = genomic DNA
ggaatggaatgaacacgaatgtaatgcaacccaatagaatggaatcgaatggcatggaatataaagaaatggaatcgaagagaatggaaacaaatggaatggaattg

SEQ ID NO: 5298 - DNA, 98 bp, Homo sapiens
  source 1..98: mol_type = genomic DNA
aggacatgaatagacaattctcaaaagaagatacacaagtggcaaacaaacacatgaaaaaagactcaacattagtaatgaccatggaaatgcaaatc

SEQ ID NO: 5299 - DNA, 92 bp, Homo sapiens
  source 1..92: mol_type = genomic DNA
tccagtcgatcatcatatagtcagcacttatcatacaccaagccgtgtgcaaggaaagggaatacaaccatgaacatgatagatggatggtt

SEQ ID NO: 5300 - DNA, 91 bp, Homo sapiens
  source 1..91: mol_type = genomic DNA
tacagataagaaaattgagactcaagagtattacataaattgtttcagctaccacagcaaaaaatggtatggttgggaatcaagctcaggg

SEQ ID NO: 5301 - DNA, 113 bp, Homo sapiens
  source 1..113: mol_type = genomic DNA
agcctatcaaaaagtgggctaagaatatgaatacacaattctcaaaagaagatatacaaatgggcaacaaacatatgaaaacatactcaacatcactaatgatcagggaaatg

SEQ ID NO: 5302 - DNA, 83 bp, Homo sapiens
  source 1..83: mol_type = genomic DNA
gaaaatgaacaatatgaacaaacaaacaaaattactacccttacgaaagtacgtgcattctagtatggtgacaaaaaggaaag

SEQ ID NO: 5303 - DNA, 95 bp, Homo sapiens
  source 1..95: mol_type = genomic DNA
acatacgcaaatcaataaacataatccatcacataaacagaaccaaagacaaaaatcacatgattatctcaatagatgcagaaaaggccttcgac

SEQ ID NO: 5304 - DNA, 77 bp, Homo sapiens
  source 1..77: mol_type = genomic DNA
aagagtatcaacagtaaattacattagcagaagaatcaacaaacatgaaaatagaaattatggtagccaaagaacag

SEQ ID NO: 5305 - DNA, 75 bp, Homo sapiens
  source 1..75: mol_type = genomic DNA
aatcgaatggaatcaacatcaaacggaaaaaaacggaattatcgaatggaatcgaagagaatcatcgaatggacc

SEQ ID NO: 5306 - DNA, 110 bp, Homo sapiens
  source 1..110: mol_type = genomic DNA
gaaaggaatagaatggaatggatcgttatggaaagacatcgaatgggatggaattgactcgaatggattggactggaatggaacggactcgaatggaatggactggaatg

SEQ ID NO: 5307 - DNA, 94 bp, Homo sapiens
  source 1..94: mol_type = genomic DNA
taagcaatttcagcagtctcaggatacaaaatcaatgtgcaaaaatcacaagcattcttatacaccaacaacagacaaacagagagccaaatcg

SEQ ID NO: 5308 - DNA, 105 bp, Homo sapiens
  source 1..105: mol_type = genomic DNA
aacggaatcaaacggaattatcgaatggaatcgaagagaatcatcgaatggccacgaatggaatcatctaatggaatggaatggaataatccatggacccgaatg

SEQ ID NO: 5309 - DNA, 93 bp, Homo sapiens
  source 1..93: mol_type = genomic DNA
acatcaaacggaatcaaacggaattatcgaatggaatcgaaaagaatcatcgaacggactcgaatggaatcatctaatggaatggaatggaag

SEQ ID NO: 5310 - DNA, 74 bp, Homo sapiens
  source 1..74: mol_type = genomic DNA
atcgaatggaatcaacatcaaacggaaaaaaacggaattatcaaatggaatcgaagagaatcatcgaatggacc

SEQ ID NO: 5311 - DNA, 86 bp, Homo sapiens
  source 1..86: mol_type = genomic DNA
gaataatcattgaacggaatcgaatggaaacatcatcgaatggaaacgaatggaatcatcatcgaatggaaatgaaaggagtcatc

SEQ ID NO: 5312 - DNA, 110 bp, Homo sapiens
  source 1..110: mol_type = genomic DNA
catcaaacggaatcaaacggaattatcgaatggaatcgaaaagaatcatcgaacggactcgaatggaatcatctaatggaatggaatggaagaatccatggactcgaatg

SEQ ID NO: 5313 - DNA, 97 bp, Homo sapiens
  source 1..97: mol_type = genomic DNA
aaacggaatcaaacggaattatcgaatggaatcgaagagaatcatcgaatggactcgaatggaatcatctaatggaatggaatggaagaatccatgg

SEQ ID NO: 5314 - DNA, 87 bp, Homo sapiens
  source 1..87: mol_type = genomic DNA
atacacaaatcaataaatgtaatccagcatataaacagaaccaaagacaaaaaccatatgattatctcaatggatgcagaaaaggcc

SEQ ID NO: 5315 - DNA, 61 bp, Homo sapiens
  source 1..61: mol_type = genomic DNA
aatcgaatagaatcatcgaatggactcgaatggaatcatcgaatgtaatgatggaacagtc

SEQ ID NO: 5316 - DNA, 124 bp, Homo sapiens
  source 1..124: mol_type = genomic DNA
tggaatggaatcatcgcatagaatcgaatggaattaccatcgaatgggatcgaatggtatcaacatcaaacgcaaaaaaacggaattatcgaatggaatcgaagagaatcttcgaacggacccg

SEQ ID NO: 5317 - DNA, 63 bp, Homo sapiens
  source 1..63: mol_type = genomic DNA
atggaatggaatggaatggaattaaatggaatggaaaggaatggaatcgaatggaaaggaatc

SEQ ID NO: 5318 - DNA, 102 bp, Homo sapiens
  source 1..102: mol_type = genomic DNA
gtcgaaatgaatagaatgcaatcatcatcaaatggaatccaatggaatcatcatcaaatagaatcgaatggaatcatcaaatggaatcgaatggagtcattg

SEQ ID NO: 5319 - DNA, 77 bp, Homo sapiens
  source 1..77: mol_type = genomic DNA
tggaattatcgaaagcaaacgaatagaatcatcgaatggactcgaatggaatcatcgaatggaatggaatggaacag

SEQ ID NO: 5320 - DNA, 69 bp, Homo sapiens
  source 1..69: mol_type = genomic DNA
aaaggaatggaatgcaatggaatgcaatggaatgcacaggaatggaatggaatggaatggaaaggaatg

SEQ ID NO: 5321 - DNA, 75 bp, Homo sapiens
  source 1..75: mol_type = genomic DNA
aatctaatggaatcaacatcaaacggaaaaaaacggaattatcgaatggaatcgaagagaatcatcgaatggacc

SEQ ID NO: 5322 - DNA, 100 bp, Homo sapiens
  source 1..100: mol_type = genomic DNA
tacacaacaaaagaaatactcaacacagtaaacagacaaccttcagaacaggagaaaatatttgcaaatacatctaacaaagggctaatatccagaatct

SEQ ID NO: 5323 - DNA, 70 bp, Homo sapiens
  source 1..70: mol_type = genomic DNA
tgcaatcctagtctcagataaaacagacattaaaccaacaaagatcaaaagagacaaagaaggccattac

SEQ ID NO: 5324 - DNA, 76 bp, Homo sapiens
  source 1..76: mol_type = genomic DNA
gaatcgaatggaatcaacatcaaacggaaaaaaacggaattatcgaatggaatcgaaaagaatcatcgaatggacc

SEQ ID NO: 5325 - DNA, 85 bp, Homo sapiens
  source 1..85: mol_type = genomic DNA
aatggaatcgaatggaatgcaatccaatggaatggaatgcaatgcaatggaatggaatcgaacggaatgcagtggaagggaatgg

SEQ ID NO: 5326 - DNA, 102 bp, Homo sapiens
  source 1..102: mol_type = genomic DNA
gaacacagaaaaatttcaaaggaataatcaacagggattgataactaactggatttagagagccaaggcaaagagaatcaaagcacagggcctgagtcggag

SEQ ID NO: 5327 - DNA, 81 bp, Homo sapiens
  source 1..81: mol_type = genomic DNA
agttgaatagaaccaatccgaatgaaatggaatggaatggaacggaatggaattgaatggaatggaatggaatgcaatgga

SEQ ID NO: 5328 - DNA, 90 bp, Homo sapiens
  source 1..90: mol_type = genomic DNA
aactcgattgcaatggaatgtaatgtaatggaatggaatggaattaacgcgaatagaatggaatggaatgtaatggaacggaatggaatg

SEQ ID NO: 5329 - DNA, 82 bp, Homo sapiens
  source 1..82: mol_type = genomic DNA
aagcggaatagaattgaatcatcattgaatggaatcgagtagaatcattgaaatcgaatggaatcatagaatggaatccaat

SEQ ID NO: 5330 - DNA, 94 bp, Homo sapiens
  source 1..94: mol_type = genomic DNA
aatggaatcgaaaggaatagaatggaatggatcgttatggaaagatatcgaatggaatggaattgactcgaatggaatggactggaatggaacg

SEQ ID NO: 5331 - DNA, 91 bp, Homo sapiens
  source 1..91: mol_type = genomic DNA
taacggaataatcatcgaacagaatcaaatggaatcatcattgaatggaattgaatggaatcttcgaatagacatgaatggaccatcatcg

SEQ ID NO: 5332 - DNA, 87 bp, Homo sapiens
  source 1..87: mol_type = genomic DNA
aacggaatcaaacggaattatcgaatggaatcgaatagaatcatcgaacggactcgaatggaatcatctaatggaatggaatggaag

SEQ ID NO: 5333 - DNA, 84 bp, Homo sapiens
  source 1..84: mol_type = genomic DNA
attggaatggaacggaacagaacggaatggaatggaatagaatggaatggaatggaatggtatggaatggaatggaatggtacg

SEQ ID NO: 5334 - DNA, 87 bp, Homo sapiens
  source 1..87: mol_type = genomic DNA
aatccacaaagacaacagaagaaaagacaacagtagacaaggatgtcaaccacattttggaagagacaagtaatcaaacacatggca

SEQ ID NO: 5335 - DNA, 118 bp, Homo sapiens
  source 1..118: mol_type = genomic DNA
gaatcgaatggaatcaacatcaaacggaaaaaaacggaattatcgaatggaatcgaaaagaatcatcgaacggactcgaatggaatcatctaatggaatggaatggaagaatccatgg

SEQ ID NO: 5336 - DNA, 73 bp, Homo sapiens
  source 1..73: mol_type = genomic DNA
aatggaatcgaatggaatcatcatcaaatggaatctaatggaatcattgaacggaattggatggaatcgtcat

SEQ ID NO: 5337 - DNA, 62 bp, Homo sapiens
  source 1..62: mol_type = genomic DNA
caacatcaaacggaaaaaaacggaattatcgaatggaatcgaagagaatcatcgaatggacc

SEQ ID NO: 5338 - DNA, 82 bp, Homo sapiens
  source 1..82: mol_type = genomic DNA
cacaaccaaagcaatgaaagaaaagcacagacttattgaaatgaaagtacacaccacagaatgggagcaggctcaagcaagc

SEQ ID NO: 5339 - DNA, 103 bp, Homo sapiens
  source 1..103: mol_type = genomic DNA
atcaaagggaatcaagcggaattatcgaatggaatcgaagagaatcatcgaatggactcgaatggaatcatgtgatggaatggaatggaataatccacggact

SEQ ID NO: 5340 - DNA, 77 bp, Homo sapiens
  source 1..77: mol_type = genomic DNA
ggaatcgaatggaatcaatatcaaacggagaaaaacggaattatcgaatggaatcgaagagaatcatcgaatggacc

SEQ ID NO: 5341 - DNA, 73 bp, Homo sapiens
  source 1..73: mol_type = genomic DNA
aggaatggacacgaacggaatgcaatcgaatggaatggaatctaatagaaaggaattgaatgaaatggactgg

SEQ ID NO: 5342 - DNA, 82 bp, Homo sapiens
  source 1..82: mol_type = genomic DNA
ggaagggaatcaaatgcaacagaatgtaatggaatggaatgcaatggaatgcaatggaatggaatggaatgcaatggaatgg

SEQ ID NO: 5343 - DNA, 133 bp, Homo sapiens
  source 1..133: mol_type = genomic DNA
aaattggattgaatcgaatcgaatggaaaaaatgaaatcaaatgaaattgaatggaatcgaaatgaatgtaaacaatggaatccaatggaatccaatggaatcgaatcaaatggttttgagtggcgtaaaatg

SEQ ID NO: 5344 - DNA, 85 bp, Homo sapiens
  source 1..85: mol_type = genomic DNA
aatggaagggaatggaatggaatcgaatcgaatggaacagaattcaatggaatggaatggaatggaatggaatcgaatggaatgg

SEQ ID NO: 5345 - DNA, 86 bp, Homo sapiens
  source 1..86: mol_type = genomic DNA
gaaaaatcattgaacggaatcgaatggaatcatcatcggatggaaacgaatggaatcatcatcgaatggaaatgaaaggagtcatc

SEQ ID NO: 5346 - DNA, 77 bp, Homo sapiens
  source 1..77: mol_type = genomic DNA
ggaatcgaatggaatcaacatcaaacggagaaaaacggaattatcgaatggaatcgaagagaatcatcgaatggacc

SEQ ID NO: 5347 - DNA, 93 bp, Homo sapiens
  source 1..93: mol_type = genomic DNA
aaagaaatgtcactgcgtatacacacacacgcacatacacacaccatggaatactactcagctatacaaaggaatgaaataatccacagccac

SEQ ID NO: 5348 - DNA, 77 bp, Homo sapiens
  source 1..77: mol_type = genomic DNA
ggaatcgaatggaatcaatatcaaacggaaaaaaacggaattatcgaatggaatcgaagagaatcatcgaatggacc

SEQ ID NO: 5349 - DNA, 76 bp, Homo sapiens
  source 1..76: mol_type = genomic DNA
tgaacggaatcgaatggaatcatcatcggatggaaacgaatggaatcatcatcgaatggaaatgaaaggagtcatc

SEQ ID NO: 5350 - DNA, 60 bp, Homo sapiens
  source 1..60: mol_type = genomic DNA
gaatagaacgaaatggaatggaatggaatggaatggaaaggaatggaatggaatggaacg

SEQ ID NO: 5351 - DNA, 136 bp, Homo sapiens
  source 1..136: mol_type = genomic DNA
tggaattatcgtcgaatagaatcgaatggtatcaacatcaaacggaaaaaaacggaattatcgaatggaatcgaagagaatcatcgaacggactcgaatggaatcatctaatggaatggaatggaataatccatgg

SEQ ID NO: 5352 - DNA, 124 bp, Homo sapiens
  source 1..124: mol_type = genomic DNA
gacaaaaagaatcatcatcgaatagaatcaaatggaatctttgaatggactcaaaaggaatatcgtcaaatggaatcaaaagccatcatcgaatggactgaaatggaattatcaaatggactcg

SEQ ID NO: 5353 - DNA, 97 bp, Homo sapiens
  source 1..97: mol_type = genomic DNA
aaccaaaccaagcaaacaaacaaacagtaaaaactcaataacaaccaacaaacaggaaataccaggtaattcagattatctagttatgtgccatagt

SEQ ID NO: 5354 - DNA, 148 bp, Homo sapiens
  source 1..148: mol_type = genomic DNA
gaatgaattgaatgcaaacatcgaatggtctcgaatggaatcatcttcaaatggaatggaatggaatcatcgcatagaatcgaatggaattatcaacgaatggaatcgaatggaatcatcatcagatggaaatgaatggaatcgtcat

SEQ ID NO: 5355 - DNA, 97 bp, Homo sapiens
  source 1..97: mol_type = genomic DNA
tggaatggaatcaaatcgcatggaatcgaatggaatagaaaagaatcaaacagagtggaatggaatggaatggaatggaatcatgccgaatggaatg

SEQ ID NO: 5356 - DNA, 148 bp, Homo sapiens
  source 1..148: mol_type = genomic DNA
aaatggaataatgaaatggaatcgaacggaatcatcatcaaaaggaaccgaatgaagtcattgaatggaatcaaaggcaatcatggtcgaatggaatcaaatggaaacagcattgaatagaattgaatggagtcatcacatggaatcg

SEQ ID NO: 5357 - DNA, 80 bp, Homo sapiens
  source 1..80: mol_type = genomic DNA
gaattaacccgaatagaatggaatggaatggaatggaacagaacggaacggaatggaatggaatggaatggaatggaatg

SEQ ID NO: 5358 - DNA, 109 bp, Homo sapiens
  source 1..109: mol_type = genomic DNA
aagatatacaagcagccaacaaacatacgaaagaatgctcaacatcactaatcctcagagaaatttaaatcaaaaccacaatgagttacaatctcataccagtcagaat

SEQ ID NO: 5359 - DNA, 94 bp, Homo sapiens
  source 1..94: mol_type = genomic DNA
agataagtggatgaacagatggacagatggatggatggatggatggatggatggatgcctggaagaaagaagaatggatagtaagctgggtata

SEQ ID NO: 5360 - DNA, 106 bp, Homo sapiens
  source 1..106: mol_type = genomic DNA
agaattacaaaccactgctcaacaaaataaaagagtacacaaacaaatggaagaatattccatgcttatggataggaagaatcaatattgtgaaaatggccatact

SEQ ID NO: 5361 - DNA, 93 bp, Homo sapiens
  source 1..93: mol_type = genomic DNA
catcgaatggactcgaatggaataatcattgaacggaatcgaagggaatcatcatcggatggaaacgaatggaatcatcatcgaatggaaatg

SEQ ID NO: 5362 - DNA, 105 bp, Homo sapiens
  source 1..105: mol_type = genomic DNA
aaaggaatcaaacggaattatcgaatggaatcgaaaagaatcatcgaacggactcgaatggaatcatctaatggaatggaatggaagaatccatggactcgaatg

SEQ ID NO: 5363 - DNA, 92 bp, Homo sapiens
  source 1..92: mol_type = genomic DNA
ggatataaacaagaaaacaactaatcacaactcaatatcaaagtgcaatgatggtgcaaaatgcaagtatggtggggacagagaaaggatgc

SEQ ID NO: 5364 - DNA, 61 bp, Homo sapiens
  source 1..61: mol_type = genomic DNA
aacatcaaacggaaaaaaacggaaatatcgaatggaatcgaagagaatcatcgaatggacc

SEQ ID NO: 5365 - DNA, 76 bp, Homo sapiens
  source 1..76: mol_type = genomic DNA
taaaatggaatcgaatggaatcaacatcaaatggaatcaaatggaatcattgaacggaattgaatggaatcgtcat

SEQ ID NO: 5366 - DNA, 84 bp, Homo sapiens
  source 1..84: mol_type = genomic DNA
aatcatcatcgaatggaatcgaatggtatcattgaatggaatcgaatggaatcatcatcagatggaaatgaatggaatcgtcat

SEQ ID NO: 5367 - DNA, 64 bp, Homo sapiens
  source 1..64: mol_type = genomic DNA
caatgcgtcaagctcagacgtgcctcactacggcaatgcgtcaagctcaggcgtgcctcactat

SEQ ID NO: 5368 - DNA, 101 bp, Homo sapiens
  source 1..101: mol_type = genomic DNA
taagctgataagcaactttagcaaagtctcaggatacaaaatcaatgtacaaaaatcacaagcattcttatacaccaacaacagacagacggagagccaaa

SEQ ID NO: 5369 - DNA, 55 bp, Homo sapiens
  source 1..55: mol_type = genomic DNA
aatcaaagaattgaatcgaatggaatcatctaatgtactcgaatggaatcaccat

SEQ ID NO: 5370 - DNA, 114 bp, Homo sapiens
  source 1..114: mol_type = genomic DNA
atgaacacgaatgtaatgcaatccaatagaatggaatcgaatggcatggaatataaagaaatggaatcgaagagaatggaaacaaatggaatggaattgaatggaatggaattg

SEQ ID NO: 5371 - DNA, 88 bp, Homo sapiens
  source 1..88: mol_type = genomic DNA
atcaaacggaatcaaacggaattatcgaatggaatcgaagagaatcatcgaacggactcgaatggaatcatctaatggaatgggatgg

SEQ ID NO: 5372 - DNA, 94 bp, Homo sapiens
  source 1..94: mol_type = genomic DNA
aatggaaaggaatcaaatggaatataatggaatgcaatggactcgaatggaatggaatggaatggacccaaatggaatggaatggaatggaatg

SEQ ID NO: 5373 - DNA, 91 bp, Homo sapiens
  source 1..91: mol_type = genomic DNA
ggaatacaacggaatggaatcgaaaaaaatggaaaggaatgaaatgaatggaatggaatggaatggaatggatgggaatggaatggaatgg

SEQ ID NO: 5374 - DNA, 95 bp, Homo sapiens
  source 1..95: mol_type = genomic DNA
gaatcaagcggaattatcgaatggaatcgaagagaatcatcgaaaggactcgaatggaatcatctaatggaatggaatggaataatacacggacc

SEQ ID NO: 5375 - DNA, 98 bp, Homo sapiens
  source 1..98: mol_type = genomic DNA
aagataacctgtgcccaggagaaaaacaatcaatggcaacaaaagcagaaacaacacaaatgatacaattagcagacagaaacattgagattgctatt

SEQ ID NO: 5376 - DNA, 88 bp, Homo sapiens
  source 1..88: mol_type = genomic DNA
aatggactccaatggaataatcattgaacggaatctaatggaatcatcatcggatggaaatgagtggaatcatcatcgaatggaatcg

SEQ ID NO: 5377 - DNA, 79 bp, Homo sapiens
  source 1..79: mol_type = genomic DNA
aatctataaacgtaatccatcacataaacaggaccaaagagaaaaaccgcatgattatctcaagaatgcagaaaaggcc

SEQ ID NO: 5378 - DNA, 95 bp, Homo sapiens
  source 1..95: mol_type = genomic DNA
taattgattcgaaattaatggaattgaatggaatgcaatcaaatggaatggaatgtaatgcaatggaatgtaatagaatggaaagcaatggaatg

SEQ ID NO: 5379 - DNA, 78 bp, Homo sapiens
  source 1..78: mol_type = genomic DNA
aaaggaatggacttgaacaaaatgaaatcgaacgataggaatcgtacagaacggaaagaaatggaacggaatggaatg

SEQ ID NO: 5380 - DNA, 94 bp, Homo sapiens
  source 1..94: mol_type = genomic DNA
tgagcagggaacaatgcggataaatttcacaaatacaatgttgagcaaaagaaagacacaaaagaatacacacatacacaccatatgggctagg

SEQ ID NO: 5381 - DNA, 79 bp, Homo sapiens
  source 1..79: mol_type = genomic DNA
aatggaatcgaacggaatcatcatcaaacggaaccgaatggaatcattgaatggaatcaaaggcaatcatggtcgaatg

SEQ ID NO: 5382 - DNA, 85 bp, Homo sapiens
  source 1..85: mol_type = genomic DNA
aatggaatggaatgtacaagaaaggaatggaatgaaaccgaatggaatggaatggacgcaaaatgaatggaatggaagtcaatgg

SEQ ID NO: 5383 - DNA, 54 bp, Homo sapiens
  source 1..54: mol_type = genomic DNA
aacggaaaaaaacggaattatcgaatggaatcgaagagaatcatcgaatggacc

SEQ ID NO: 5384 - DNA, 87 bp, Homo sapiens
  source 1..87: mol_type = genomic DNA
ggaataatcattgaacggaatcgaatggaatcatcatcggatggaaacgaatggaatcatcatcgaatggaaatgaaaggagtcatc

SEQ ID NO: 5385 - DNA, 82 bp, Homo sapiens
  source 1..82: mol_type = genomic DNA
ggaacgaaatcgaatggaacggaatagaatagactcgaatgtaatggattgctatgtaattgattcgaatggaatggaatcg

SEQ ID NO: 5386 - DNA, 80 bp, Homo sapiens
  source 1..80: mol_type = genomic DNA
tgaaaggaatagactggaacaaaatgaaatcgaatggtaggaatcatacagaacagaaagaaatggaacggaatggaatg

SEQ ID NO: 5387 - DNA, 75 bp, Homo sapiens
  source 1..75: mol_type = genomic DNA
aacccgaatagaatggaatggaatggaatggaacggaacggaatggaatggaatggattggaatggaatggaatg

SEQ ID NO: 5388 - DNA, 90 bp, Homo sapiens
  source 1..90: mol_type = genomic DNA
aaagagaatcaaatggaattgaatcgaatggaatcgaatggattggaaaggaatagaatggaatggaatggaatggaatggaatggaatg

SEQ ID NO: 5389 - DNA, 70 bp, Homo sapiens
  source 1..70: mol_type = genomic DNA
aatggaatcatcagtaatggaatggaaaggaatggaaaggactggaatggaatggaatggaatggaatgg

SEQ ID NO: 5390 - DNA, 116 bp, Homo sapiens
  source 1..116: mol_type = genomic DNA
ggaacaaaatgaaatcgaacggtaggaatcgtacagaacggaaagaaatggaacggaatggaatgcactcaaatggaaaggagtccaatggaatcgaaaggaatagaatggaatgg

SEQ ID NO: 5391 - DNA, 132 bp, Homo sapiens
  source 1..132: mol_type = genomic DNA
agaatgagatcaagcagtataataaaggaagaagtagcaaaattacaacagagcagtgaaatggatatgctttctggcaataattgtgaaaggtctggtaatgagaaagtagcaacagctagtggctgccac

SEQ ID NO: 5392 - DNA, 98 bp, Homo sapiens
  source 1..98: mol_type = genomic DNA
aacaaatggaatcaacatcgaatggaatcgaatggaaacaccatcgaattgaaacgaatggaattatcatgaaattgaaatggatggactcatcatcg

SEQ ID NO: 5393 - DNA, 125 bp, Homo sapiens
  source 1..125: mol_type = genomic DNA
taacatgcagcatgcacacacgaatacacaacacacaaacatgtatgcacgcacacgtgaatacacaacacacacaaacatgcatgcatgcatacatgaatacacagcacacaaatatccagcat

SEQ ID NO: 5394 - DNA, 72 bp, Homo sapiens
  source 1..72: mol_type = genomic DNA
gaatggaatcaacatcaaacggaaaaaaaacggaattatcgaatggaatcgaatagaatcatcgaatggacc

SEQ ID NO: 5395 - DNA, 98 bp, Homo sapiens
  source 1..98: mol_type = genomic DNA
aatcgaatgaaatggagtcaaaaggaatggaatcgaatggcaagaaatcgaatgtaatggaatcgcaaggaattgatgtgaacggaacggaatggaat

SEQ ID NO: 5396 - DNA, 91 bp, Homo sapiens
  source 1..91: mol_type = genomic DNA
aatggaattgaacggaaacatcagcgaatggaatcgaaaggaatcatcatggaatagattcgaatggaatggaaaggaatggaatggaatg

SEQ ID NO: 5397 - DNA, 132 bp, Homo sapiens
  source 1..132: mol_type = genomic DNA
atggaatcaacatcaaacagaatcaaacggaattatcgaatggaatcgaagacaatcatcgaatggactcgaatggaatcatctaatggaatggaatggaagaatccatggtctcgaatgcaatcatcatcg

SEQ ID NO: 5398 - DNA, 86 bp, Homo sapiens
  source 1..86: mol_type = genomic DNA
gaataatcattgaacggaatcgaatggaatcatcttcggatggaaacgaatggaatcatcatcgaatggaaatgaaaggagtcatc

SEQ ID NO: 5399 - DNA, 88 bp, Homo sapiens
  source 1..88: mol_type = genomic DNA
aatggactcgaatggaataatcattgaacggaatcgaatggaatcatcatcggatggaaatgagtggaatcatcatcgaatggaatcg

SEQ ID NO: 5400 - DNA, 98 bp, Homo sapiens
  source 1..98: mol_type = genomic DNA
aaatgaaatcgaacggtaggaatcgtacagaacggaaagaaatggaacggaatggaatgcaatcgaatggaaaggagtccaatggaagggaatcgaat

SEQ ID NO: 5401 - DNA, 93 bp, Homo sapiens
  source 1..93: mol_type = genomic DNA
taccaaacatttaaagaacaaatatcaatcctacgcaaaccattctgaaacacagagatggaggatatacagcgaaactcattctacatggcc

SEQ ID NO: 5402 - DNA, 106 bp, Homo sapiens
  source 1..106: mol_type = genomic DNA
tattggaatggaatggaatggagtcgaatggaacggaatgcactcgaatggaaggcaatgcaatggaatgcactcaacaggaatagaatggaatggaatggaatgg

SEQ ID NO: 5403 - DNA, 64 bp, Homo sapiens
  source 1..64: mol_type = genomic DNA
ggaatttaatagaatgtacccgaatggaacggaatggaatggaattgtatggcatggaatggaa

SEQ ID NO: 5404 - DNA, 97 bp, Homo sapiens
  source 1..97: mol_type = genomic DNA
gcaatccaatagaatggaatcgaatggcatggaatataaagaaatggaatcgaagagaatggagacaaatggaatggaattgaatggaatggaattg

SEQ ID NO: 5405 - DNA, 118 bp, Homo sapiens
  source 1..118: mol_type = genomic DNA
aatggaatcgaatggaatcatcatcaaatggaatctaatggaatcattgaacggaattaaatggaatcgtcatcgaatgaattcaatgcaatcaacgaatggtctcgaatggaaccac

SEQ ID NO: 5406 - DNA, 106 bp, Homo sapiens
  source 1..106: mol_type = genomic DNA
aattgcaaaagaaacacacatatacacatataaaactcaagaaagacaaaactaacctatggtgatagaaatcagaaaagtacagtacattggttgtcttggtggg

SEQ ID NO: 5407 - DNA, 89 bp, Homo sapiens
  source 1..89: mol_type = genomic DNA
tgacatcattattatcaagaaacattcttaccactgttaccaacttcccaacacagactatggagagagagataagacagaatagcatt

SEQ ID NO: 5408 - DNA, 89 bp, Homo sapiens
  source 1..89: mol_type = genomic DNA
aaagaattgaattgaatagaatcaccaatgaattgaatcgaatggaatcgtcatcgaatggaatcgaagggaatcattggatgggctca

SEQ ID NO: 5409 - DNA, 87 bp, Homo sapiens
  source 1..87: mol_type = genomic DNA
atcatcgaatggaatcgaatggaatcaatatcaaacggaaaaaaacggaattatcgaatggaatcgaatagaatcatcgaatggacc

SEQ ID NO: 5410 - DNA, 83 bp, Homo sapiens
  source 1..83: mol_type = genomic DNA
gaatgaaatcgtatagaatcatcgaatgcaactgaatggaatcattaaatggacttgaaaggaattattatggaatggaattg

SEQ ID NO: 5411 - DNA, 90 bp, Homo sapiens
  source 1..90: mol_type = genomic DNA
taagcaacttcagcaaagtctcaggatacaaaatcaatgtgcaaaaatctcaagcattcttatacacgaacaacagacaaacagagagct

SEQ ID NO: 5412 - DNA, 79 bp, Homo sapiens
  source 1..79: mol_type = genomic DNA
actcaaaaggaattgattcgaatggaatagaatggcaaggaatagtattgaattgaatggaatggaatggacccaaatg

SEQ ID NO: 5413 - DNA, 95 bp, Homo sapiens
  source 1..95: mol_type = genomic DNA
gaatggaatttaaaggaatagaatggaaggaatcggatggaatggaatggaatagaatggagtcgaatggaatagaatcgaatggaatggcattg

SEQ ID NO: 5414 - DNA, 124 bp, Homo sapiens
  source 1..124: mol_type = genomic DNA
tgagaaaatgatggaaaagaggaataaaacgaaacaaaaccacaggaacacaggtgcatgtgaatgtgcacagacaaagatacagggcggactgggaaggaagtttctgcaccagaatttgggg

SEQ ID NO: 5415 - DNA, 86 bp, Homo sapiens
  source 1..86: mol_type = genomic DNA
aacaaaaaatgagtcaagccttaaataaaatcagagccaaaaaagaagacattacatctgataagacaaaaattcaaaggaccatc

SEQ ID NO: 5416 - DNA, 96 bp, Homo sapiens
  source 1..96: mol_type = genomic DNA
aacccagtggaattgaattgaatggaattgaatggaatggaaagaatcaatccgagtcgaatggaatggtatggaatggaatggcatggaatcaac

SEQ ID NO: 5417 - DNA, 65 bp, Homo sapiens
  source 1..65: mol_type = genomic DNA
atcaacatcaaacggaaaaaaaacggaattatcgaatggaatcgaagagaatcatcgaatggacc

SEQ ID NO: 5418 - DNA, 92 bp, Homo sapiens
  source 1..92: mol_type = genomic DNA
aaggaatggaatggtacggaatagaatggaatggaacgaattgtaatggaatggaatttaatggaacggaatggaatggaatggaatcaacg

SEQ ID NO: 5419 - DNA, 66 bp, Homo sapiens
  source 1..66: mol_type = genomic DNA
aacggaatggaaagcaatttaatcaaatgcaatacagtggaattgaagggaatggaatggaatggc

SEQ ID NO: 5420 - DNA, 150 bp, Homo sapiens
  source 1..150: mol_type = genomic DNA
aatcgaatggaacggaatagaatagactcgaatgtaatggattgctatgtaattgattcgaatggaatggaatcgaatggaatgcaatccaatggaatggaatgcaatgcaatggaatggaatcgaacggaatgcagtggaagggaatgg

SEQ ID NO: 5421 - DNA, 87 bp, Homo sapiens
  source 1..87: mol_type = genomic DNA
tagcaacattttagtaacatgatagaaacaaaacagcaacatagcaatgcaatagtaacacaacagcaacatcataacatggcagca

SEQ ID NO: 5422 - DNA, 79 bp, Homo sapiens
  source 1..79: mol_type = genomic DNA
aatggaatcgaagagaatggaaacaaatggaatggaattgaatggaatggaattgaatggaatgggaaggaatggagtg

SEQ ID NO: 5423 - DNA, 136 bp, Homo sapiens
  source 1..136: mol_type = genomic DNA
agcaaacaagtgaataaacaagcaaacaagtgaacaagcaaacaagtgaataaacaagcaaacaagtgaacaagcaaacaagtgaataaacaagcaaacaagtgaacaaggaaacaagtgaataaacaaaggctct

SEQ ID NO: 5424 - DNA, 94 bp, Homo sapiens
  source 1..94: mol_type = genomic DNA
aatggaatcaacacgagtgcaattgaatggaatcgaatggaatggaatggaatggaatgaattcaacccgaatggaatggaaaggaatggaatc

SEQ ID NO: 5425 - DNA, 76 bp, Homo sapiens
  source 1..76: mol_type = genomic DNA
gaatcgaatggaatcaacatcaaacggaaaaaaacggaattatcgaatggaatcgaagagaatcatcgaatggacc

SEQ ID NO: 5426 - DNA, 141 bp, Homo sapiens
  source 1..141: mol_type = genomic DNA
aacacgaatgtaatgcaatccaatagaatggaatcgaatggcatggaatataaagaaatggaatcgaagagaatggaaacaaacggaatggaattgaatggaatggaattgaatggaatgggaacgaatggagtgaaattg

SEQ ID NO: 5427 - DNA, 146 bp, Homo sapiens
  source 1..146: mol_type = genomic DNA
gaatggaacggaatagaacagactcgaatgtaatggattgctatgtaattgattcgaatggaatggaatcgaatggaatgcaatccaatggaatggaatgcaatgcaatggaatggaatcgaatggaatgcagtggaagggaatgg

SEQ ID NO: 5428 - DNA, 76 bp, Homo sapiens
  source 1..76: mol_type = genomic DNA
gaatcgaatggaatcaatatcaaacggaaaaaaacggaattatcgaatggaatcgaagagaatcatcgaatggacc

SEQ ID NO: 5429 - DNA, 136 bp, Homo sapiens
  source 1..136: mol_type = genomic DNA
ataaacatcaaacggaatcaaacggaattatcgaatggaatcgaagagaataatcgaatggactcaaatggagtcatctaatggaatggtatggaagaatccatggactccaacgcaatcatcagcgaatggaatc

SEQ ID NO: 5430 - DNA, 101 bp, Homo sapiens
  source 1..101: mol_type = genomic DNA
aaaagaaaagacaaaagacaccaattgccaatactgaaatgaaaaaacaggtaataactattgatcccatggacattaaaatgatgttgaaggaacaccac

SEQ ID NO: 5431 - DNA, 76 bp, Homo sapiens
  source 1..76: mol_type = genomic DNA
aatgtcaagtggaatcgagtggaatcatcgaaagaaatcgaatggaatcgaagggaatcattggatgggctcaaat

SEQ ID NO: 5432 - DNA, 87 bp, Homo sapiens
  source 1..87: mol_type = genomic DNA
atcatcgaatggaatagaatggtatcaacatcaaacggagaaaaacggaattatcgaatggaatcgaagagaatcttcgaacggacc

SEQ ID NO: 5433 - DNA, 122 bp, Homo sapiens
  source 1..122: mol_type = genomic DNA
gaatggaatcatcgcatagaatcggatggaattatcatcgaatggaatcgaatggtatcaacatcaaacggaaaaaaacggaattatcgaatggaatcgaattgaatcatcgaacggacccg

SEQ ID NO: 5434 - DNA, 133 bp, Homo sapiens
  source 1..133: mol_type = genomic DNA
aatggactcgaatggaataatcattgaacggaatcgaatggaatcatcatcggatggaaatgaatggaataatccatggactcgaatgcaatcatcatcgaatggaatcgaatggaatcatcgaatggactcg

SEQ ID NO: 5435 - DNA, 70 bp, Homo sapiens
  source 1..70: mol_type = genomic DNA
aatgcaatcatcaactggcttcgaatggaatcatcaagaatggaatcgaatggaatcatcgaatggactc

SEQ ID NO: 5436 - DNA, 68 bp, Homo sapiens
  source 1..68: mol_type = genomic DNA
aagagaccaataaggaataagtaagcaacaagaggaaggagaaaagggcaagagagatgaccagagtt

SEQ ID NO: 5437 - DNA, 87 bp, Homo sapiens
  source 1..87: mol_type = genomic DNA
tggaatcatcataaaatggaatcgaatggaatcaacatcaaatggaatcaaatggaatcattgaacggaattgaatggaatcgtcat

SEQ ID NO: 5438 - DNA, 117 bp, Homo sapiens
  source 1..117: mol_type = genomic DNA
ggaatcatcgcatagaatcgaatggaattatcatcgaatggaatcgaatggaatcaacatcaaacgaaaaaaaaccggaattatcgaatggaatcgaagagaatcatcgaacggacc

SEQ ID NO: 5439 - DNA, 85 bp, Homo sapiens
  source 1..85: mol_type = genomic DNA
aaatcatcatcgaatgggatcgaatggtatccttgaatggaatcgaatggaatcatcatcagatggaaatgaatggaatcgtcat

SEQ ID NO: 5440 - DNA, 104 bp, Homo sapiens
  source 1..104: mol_type = genomic DNA
ggaatgtaatagaacggaaagcaatggaatggaacgcactggattcgagtgcaatggaatctattggaatggaatcgaatggaatggtttggcatggaatggac

SEQ ID NO: 5441 - DNA, 84 bp, Homo sapiens
  source 1..84: mol_type = genomic DNA
aaacaatggaagataatggaaagatatcgaatggaatagaatggaatggaatggactcaaatggaatggactttaatggaatgg

SEQ ID NO: 5442 - DNA, 148 bp, Homo sapiens
  source 1..148: mol_type = genomic DNA
ggaacgaaatcgaatggaacggaatagaatagactcgaatgtaatggattgctatgtaattgattcgaatggaatggaatcgaatggaatgcaatccaatggaatggaatgcaatgcaatgaatggaatggaatggaatggaatggaa

SEQ ID NO: 5443 - DNA, 85 bp, Homo sapiens
  source 1..85: mol_type = genomic DNA
aaaccgaatggaatggaatggacgcaaaatgaatggaatggaagtcaatggactcgaaatgaatggaatggaatggaatggaatg

SEQ ID NO: 5444 - DNA, 77 bp, Homo sapiens
  source 1..77: mol_type = genomic DNA
ggaatcgaatggaatcaacatcaaacggaaaaaaacagaattatcgtatggaatcgaatagaatcatcgaatggacc

SEQ ID NO: 5445 - DNA, 96 bp, Homo sapiens
  source 1..96: mol_type = genomic DNA
caacccgagtggaataaaatggaatggaatggaatgaaatggaatggatcggaatggaatccaatggaatcaactggaatggaatggaatggaatg

SEQ ID NO: 5446 - DNA, 88 bp, Homo sapiens
  source 1..88: mol_type = genomic DNA
tatcatcgaatggaatcgaatggaatcaacatcaaacggaaaaaaacggaattatcgaatggaatcgaagagaatcatcgaatggacc

SEQ ID NO: 5447 - DNA, 88 bp, Homo sapiens
  source 1..88: mol_type = genomic DNA
cggaataatcattgaacggaatcgaatggaatcatcatcggatggaaacgaatggaatcatcatcgaatggaaatgaaaggagtcatc

SEQ ID NO: 5448 - DNA, 83 bp, Homo sapiens
  source 1..83: mol_type = genomic DNA
caacacacagagattaaaacaaacaaacaaacaatccagccctgacatttatgagtttacagactggtggagaggcagagaag

SEQ ID NO: 5449 - DNA, 71 bp, Homo sapiens
  source 1..71: mol_type = genomic DNA
cactacaaaccacgctcaaggcaataaaagaacacaaacaaatggaaaaacattccatgctcatggatggg

SEQ ID NO: 5450 - DNA, 75 bp, Homo sapiens
  source 1..75: mol_type = genomic DNA
aatcgaatggaattaacatcaaacggaaaaaaacggaattatcgaatggaatcgaagagaatcatcgaatggacc

SEQ ID NO: 5451 - DNA, 82 bp, Homo sapiens
  source 1..82: mol_type = genomic DNA
tggaaaagaatcaaattgaatggcatcgaacggaatgggatggaatggaatagacccagatgtaatggactcgaatggaatg

SEQ ID NO: 5452 - DNA, 95 bp, Homo sapiens
  source 1..95: mol_type = genomic DNA
gactaatattcagaatatacaaggaactcaaacaactcaacagtagaaaaaaaaacctgaatagacatttctcaaaagaagacatacaaatggcc

SEQ ID NO: 5453 - DNA, 67 bp, Homo sapiens
  source 1..67: mol_type = genomic DNA
ggtccattcgatgattctcttcgattccattcgataattccgttttttcccgtttgatgttgattcc

SEQ ID NO: 5454 - DNA, 147 bp, Homo sapiens
  source 1..147: mol_type = genomic DNA
ggaacgaaatcgaatggaacggaatagaatagactcgaatgtaatggattgctatgtaattgattcgaatggaatggaatcgaatggaatgcaatccaatggaatggaatgcaatgcaatgaatggaatggaatggaatggaatgga

SEQ ID NO: 5455 - DNA, 91 bp, Homo sapiens
  source 1..91: mol_type = genomic DNA
agcaacttcagtaaagtgtcaggatacaaaatcaatgtgcaaaaatcacaagcattcttatacatcaataacagacaaacagagagccaaa

SEQ ID NO: 5456 - DNA, 86 bp, Homo sapiens
  source 1..86: mol_type = genomic DNA
gaataatcattgaacggaatcgaatggaatcatcatcggatggaaacgaatggaatcatcatcgaatggaaatgaaaggagtcatc

SEQ ID NO: 5457 - DNA, 66 bp, Homo sapiens
  source 1..66: mol_type = genomic DNA
taatcatcttcgaattgaaaacaaagcaatcattaaatgtactctaacggaatcatcgaatggacc

SEQ ID NO: 5458 - DNA, 77 bp, Homo sapiens
  source 1..77: mol_type = genomic DNA
ggaatcgaatggaatcaacatcaaacggaaaaaaacggaattatcgaatggaatcgaagagaatcatcgaatggacc

SEQ ID NO: 5459 - DNA, 86 bp, Homo sapiens
  source 1..86: mol_type = genomic DNA
agagaaaagatgatcatgtaaccattgaaaagacaatgtacaaaactaatactaatcacacaggaccagaaagcaatttagaccat

SEQ ID NO: 5460 - DNA, 79 bp, Homo sapiens
  source 1..79: mol_type = genomic DNA
aatggaatcgaatggaatcaacatcaaacggaaaaaacggaattatcgaatggaatcaaagagaatcatcgaatggacc

SEQ ID NO: 5461 - DNA, 96 bp, Homo sapiens
  source 1..96: mol_type = genomic DNA
aatggaattatcatcgaatggaatcgaatggaatcaacatcaaacggaaaaaaacggaattatcgaatggaatcgaagagaatcatcgaatggacc

SEQ ID NO: 5462 - DNA, 149 bp, Homo sapiens
  source 1..149: mol_type = genomic DNA
gtcaacacaggaccaacataggaccaacacagggtcaacacaggaccaacataggaccaacacagggtcaacacaagaccaacatgggaccaacacagggtcaacataggaccaacatgggaccaacacagggtcaacacaggaccaac

SEQ ID NO: 5463 - DNA, 79 bp, Homo sapiens
  source 1..79: mol_type = genomic DNA
gaatcaactcgattgcaatcgaatggaatggaatggtattaacagaatagaatggaatggaatggaatggaacggaacg

SEQ ID NO: 5464 - DNA, 105 bp, Homo sapiens
  source 1..105: mol_type = genomic DNA
actcgaatgcaatcaacatcaaacggaatcaaacggaattatcgaatggaatcgaagagaatcatcgaacggactcgaatggaatcatctaatggaatggaatgg

SEQ ID NO: 5465 - DNA, 86 bp, Homo sapiens
  source 1..86: mol_type = genomic DNA
aatggaatggaataatcgacggacccgaatgcaatcatcatcgtacagaatcgaatggaatcatcgaatggactggaatggaatgg

SEQ ID NO: 5466 - DNA, 106 bp, Homo sapiens
  source 1..106: mol_type = genomic DNA
aatacaaaccactgctcaacgaaataaaagaggatacaaacaaatggaagaacattctatgctcatgggtaggatgaattcatatcgtgaaaatggccatactgcc

SEQ ID NO: 5467 - DNA, 142 bp, Homo sapiens
  source 1..142: mol_type = genomic DNA
aaacacgcaaacacacacacaagcacactaccacacaagcggacacacatgcaaacacgcgaacacacacacatatacacacaagcacattacaaaacacaagcaaacaccagcagacacacaaacacacaaacatacatgg

SEQ ID NO: 5468 - DNA, 76 bp, Homo sapiens
  source 1..76: mol_type = genomic DNA
aatcgaacggaatcaacatcaaacggaaaaaaaacggaattatcgaatggaatcgaagagaatcatcgaatggacc

SEQ ID NO: 5469 - DNA, 81 bp, Homo sapiens
  source 1..81: mol_type = genomic DNA
taattgattcgaatggaatggaatagaatggaattgaatggaatggaccataatggattggactttaatagaaagggcatg

SEQ ID NO: 5470 - DNA, 88 bp, Homo sapiens
  source 1..88: mol_type = genomic DNA
agcaacttcagcaaagtctcaggatacaaaatcaatgtacaaaagtcacaagcattcttatacaccaacaaaagacaaacagagagcc

SEQ ID NO: 5471 - DNA, 68 bp, Homo sapiens
  source 1..68: mol_type = genomic DNA
acatcaaacggaaaaaaaaaacaaaacggaattatcgaatggaatcgaagagaatcatcgaatggacc

SEQ ID NO: 5472 - DNA, 81 bp, Homo sapiens
  source 1..81: mol_type = genomic DNA
gaaattccaattaaaatgaaatcgacttatcttaacaaatatagcaatgctgacaacacttctccggatatgggtactgct

SEQ ID NO: 5473 - DNA, 92 bp, Homo sapiens
  source 1..92: mol_type = genomic DNA
acatctcacttttagtaatgaacagatcattcagacagaaaattagcaaagaaacatcagagttaaactacactctaaaccaaatggaccta

SEQ ID NO: 5474 - DNA, 88 bp, Homo sapiens
  source 1..88: mol_type = genomic DNA
gaagaaagcattcattcaagacatctaactcgttgatataatgcatacagttcaaaatgattacactatcattacatctagggctttc

SEQ ID NO: 5475 - DNA, 62 bp, Homo sapiens
  source 1..62: mol_type = genomic DNA
acacacacattcaaagcagcaatatttacaacagccaaaaggtggaaacaattgagcaattg

SEQ ID NO: 5476 - DNA, 87 bp, Homo sapiens
  source 1..87: mol_type = genomic DNA
atcatcgaatagaatcgaatggtatcaacaccaaacggaaaaaaacggaattatcgaatggaatcgaagagaatcttcgaacggacc

SEQ ID NO: 5477 - DNA, 63 bp, Homo sapiens
  source 1..63: mol_type = genomic DNA
atcaacatcaaacggaaaaaacggaattatcgaatggaatcgaagagaatcatcgaacggacc

SEQ ID NO: 5478 - DNA, 92 bp, Homo sapiens
  source 1..92: mol_type = genomic DNA
aatcgaaaggaatgtcatcgaatggaatggactcaaatggaatagaatcggatggaatggcatcgaatggaatggaatggaattggatggac

SEQ ID NO: 5479 - DNA, 138 bp, Homo sapiens
  source 1..138: mol_type = genomic DNA
aacatgaacagtggaacaatcagtgaaccaatacaagggttaaataagctagcaattaaaagctgtatcactggtctaaagatagaagatcaagtagaaaatcagcgcaagaggaaagatatacgaaaactaatggcc

SEQ ID NO: 5480 - DNA, 123 bp, Homo sapiens
  source 1..123: mol_type = genomic DNA
cgaatggaatcattatggaatggaatgaaatggaataatcaaatggaattgaatggaatcatcgaatggaatcgaacaaaatcctctttgaatggaataagatggaatcaccaaatggaattg

SEQ ID NO: 5481 - DNA, 79 bp, Homo sapiens
  source 1..79: mol_type = genomic DNA
aagggaattgaatagaatgaatccgaatggaatggaatggaatggaatggaatggaatggaatggaatggaatggaatg

SEQ ID NO: 5482 - DNA, 84 bp, Homo sapiens
  source 1..84: mol_type = genomic DNA
gaatggaatcgaatcaaattaaatcaaatggaatgcaatagaagggaatacaatggaatagaatggaatggaatggaatggact

SEQ ID NO: 5483 - DNA, 100 bp, Homo sapiens
  source 1..100: mol_type = genomic DNA
aaacggaatcaaacggaattatcgaatggaatcgaagagaatcatcgaacggactcgaatggaatcatctaatggaatggaatggaagaatccatggact

SEQ ID NO: 5484 - DNA, 101 bp, Homo sapiens
  source 1..101: mol_type = genomic DNA
atggaatcaacatcaaacggaaaaaaaaacggaattatcgaatggaatcgaagagaatcatcgaatggaccagaatggaatcatctaatggaatggaatgg

SEQ ID NO: 5485 - DNA, 88 bp, Homo sapiens
  source 1..88: mol_type = genomic DNA
aatggaatcatcatcgaatggaatcgaatggaatcatggaatggaatcaaatggaatcaaatggaatcgaatggaatggaatggaatg

SEQ ID NO: 5486 - DNA, 87 bp, Homo sapiens
  source 1..87: mol_type = genomic DNA
aacggaatcaaacggaattaccgaatggaatcgaatagaatcatcgaacggactcgaatggaatcatctaatggaatggaatggaag

SEQ ID NO: 5487 - DNA, 97 bp, Homo sapiens
  source 1..97: mol_type = genomic DNA
aaacggaatcaaacggaattatcgaatggaatcgaaaagaatcatcgaacggactcgaatggaatcatctaatggaatggaatggaagaatccatgg

SEQ ID NO: 5488 - DNA, 71 bp, Homo sapiens
  source 1..71: mol_type = genomic DNA
gaatgatacggaatacaatggaatggaacgaaatgaaatggaatggaatggaatggaatggaatggaatgg

SEQ ID NO: 5489 - DNA, 104 bp, Homo sapiens
  source 1..104: mol_type = genomic DNA
acagcaagagagaaataaaacgacaagaaaactacaaaatgcctatcaatagttactttaaatatcagtggaccaaatcagtgaaacaaaagacacagagtggc

SEQ ID NO: 5490 - DNA, 89 bp, Homo sapiens
  source 1..89: mol_type = genomic DNA
aatggactcgaatggattaatcattgaacggaatcgaatggaatcatcatcggatggtaatgaatggaatcatcatcgaatggaatcgg

SEQ ID NO: 5491 - DNA, 101 bp, Homo sapiens
  source 1..101: mol_type = genomic DNA
gaatggaatcgaaaggaatgtcatcgaatggaatggaatggaacggaatggaatcgaatggaatggactcgaatggaatagaatcgaatgcaatggcatcg

SEQ ID NO: 5492 - DNA, 74 bp, Homo sapiens
  source 1..74: mol_type = genomic DNA
atcgaatggaatcaacatcagacggaaaaaaacggaattatcaaatggaatcgaagagaatcatcgaatggacc

SEQ ID NO: 5493 - DNA, 88 bp, Homo sapiens
  source 1..88: mol_type = genomic DNA
agcaacttcagcaaagtctcaggatacaaaatcaatgtgcaaaaatcaaaagcattcttatgcaccaataacagacacagagccaaat

SEQ ID NO: 5494 - DNA, 79 bp, Homo sapiens
  source 1..79: mol_type = genomic DNA
aatggaatggaacgcaattgaatggaatggaatggaacggaatcaacctgagtcaaatggaatggaatggaatggaatg

SEQ ID NO: 5495 - DNA, 82 bp, Homo sapiens
  source 1..82: mol_type = genomic DNA
ggaacgaaatcgaatggaacggaatagaatagactcgaatgtcatggattgctatgtaattgattggaatggaatggaatcg

SEQ ID NO: 5496 - DNA, 80 bp, Homo sapiens
  source 1..80: mol_type = genomic DNA
tagcaggaaacagcaaactcaaattaagtaatttcaagagcgtatcatcaatgaactattttcaaagatgtgggcaagat

SEQ ID NO: 5497 - DNA, 96 bp, Homo sapiens
  source 1..96: mol_type = genomic DNA
gaattgaaaggaatgtattggaataaaatggaatcgaataggttgaaataccataggttcgaattgaatggaatgggagggacaccaatggaattg

SEQ ID NO: 5498 - DNA, 89 bp, Homo sapiens
  source 1..89: mol_type = genomic DNA
aagcaacttcagcaaagtctcgggatacaaaatcaatgtgcaaaaatcacaagcattcttatacaccactaacagacaaatggagagtc

SEQ ID NO: 5499 - DNA, 113 bp, Homo sapiens
  source 1..113: mol_type = genomic DNA
gaatggaatcaacatcaaacggaaaaaaacggaattatcgaatggaatcgaagagaatcatcgaatggaccagaatggaatcatctaatggaatggaatggaataatccatgg

SEQ ID NO: 5500 - DNA, 77 bp, Homo sapiens
  source 1..77: mol_type = genomic DNA
aaaagcaattggactgattttaaatatacgtggcaacaaggataaactgctaatgatgggtttgcaaatacagatcg

SEQ ID NO: 5501 - DNA, 70 bp, Homo sapiens
  source 1..70: mol_type = genomic DNA
aatggaatcaacatcgaacggaaaaaaacggaattatcgaatggaatcgaagagaatcatcgaatggacc

SEQ ID NO: 5502 - DNA, 78 bp, Homo sapiens
  source 1..78: mol_type = genomic DNA
aaacggaattatcaaatggaatcgaagagaatcatcgaacggactcgaatggaatcatctaatggaatggaatggaag

SEQ ID NO: 5503 - DNA, 108 bp, Homo sapiens
  source 1..108: mol_type = genomic DNA
tgcaagataacacattttagttgacaccattgaaaacagttttaaccaagaatattagaaccaatgaagcagagaaatcaaaagggtggatggaactgccaaaggatg

SEQ ID NO: 5504 - DNA, 97 bp, Homo sapiens
  source 1..97: mol_type = genomic DNA
tagaacagaattgaatggaatggcatcaaatggaatggaaacgaaaggaatggaattgaatggactcaaatgttatggaatcaaagggaatggactc

SEQ ID NO: 5505 - DNA, 93 bp, Homo sapiens
  source 1..93: mol_type = genomic DNA
aagagaatcatcgaatggaatcgaatggaatcaacatcaaacggaaaaaaacggaattatcgaatggaatcgaagagaatcatcgaatggacc

SEQ ID NO: 5506 - DNA, 64 bp, Homo sapiens
  source 1..64: mol_type = genomic DNA
atcaacatcaaacggaaaaaaacggaattatcgaatggaatcgaagagaatcatcgaatggacc

SEQ ID NO: 5507 - DNA, 66 bp, Homo sapiens
  source 1..66: mol_type = genomic DNA
gaatcaacatcaaacggaaaaaaaccgaattatcgaatggaatcgaagagaatcatcgaatggacc

SEQ ID NO: 5508 - DNA, 106 bp, Homo sapiens
  source 1..106: mol_type = genomic DNA
atcaacatcaaacggaatcaaacggaattatcgaatggaatcgaagagaatcatcaaatggactcgaatggaatcatctaatggaatggaatggaagaatccatgg

SEQ ID NO: 5509 - DNA, 89 bp, Homo sapiens
  source 1..89: mol_type = genomic DNA
atcgaatggaatcattgaatggaaaggaatggaatcatcatggaatggaaacgaatggaatcactgaatggactcgaatgggatcatca

SEQ ID NO: 5510 - DNA, 90 bp, Homo sapiens
  source 1..90: mol_type = genomic DNA
attcagcctttaaaaaaagaagacagtcctgtcatttgtgacaatatgaatgaaacagacatcacattaaatgaaatgagccaggcgcag

SEQ ID NO: 5511 - DNA, 136 bp, Homo sapiens
  source 1..136: mol_type = genomic DNA
gaatgaaatgaaatcaaatggaatgtacatgaatggaatagaaaagaatgcatctttctcgaacggaagtgcattgaatggaaaggaatctactggaatggattcgaatggaatggaatgggatggaatggtatgg

SEQ ID NO: 5512 - DNA, 157 bp, Homo sapiens
  source 1..157: mol_type = genomic DNA
aacatcaaacggaatcaaacggaattatcgaatggaatcgaagagaatcatcgaacggactcgaatggaatcatctaatggaatggaatggaagaatccatggactcgaatgcaatcatcatcgaatgaaatcgaatggaatcatcgaatggactcg

SEQ ID NO: 5513 - DNA, 72 bp, Homo sapiens
  source 1..72: mol_type = genomic DNA
atggaattcaatggaatggacatgaatggaatggacttcaatggaatggtatcaaatggaatggaattcagt

SEQ ID NO: 5514 - DNA, 85 bp, Homo sapiens
  source 1..85: mol_type = genomic DNA
aatggaaaggaatcgaatggaagggaatgaaattgaatcaacaggaatggaagggaatagaatagacggcaatggaatggactcg

SEQ ID NO: 5515 - DNA, 88 bp, Homo sapiens
  source 1..88: mol_type = genomic DNA
agcaacttcagcaaagtatcaggatacaaaatcaatgtacaaaaatcccaagcattcttatacaccaacaacagacaaacagagagcc

SEQ ID NO: 5516 - DNA, 88 bp, Homo sapiens
  source 1..88: mol_type = genomic DNA
agcaacttcagcaaagtctcaggatacaaaatcgatgtgcaaaaatcacaagcattcttatacaccaacaacagataaacagagagcc

SEQ ID NO: 5517 - DNA, 106 bp, Homo sapiens
  source 1..106: mol_type = genomic DNA
aacggaaaaaaaacggaattatcgaatggaatcgaagagaatcatcgaatggaccagaatggaatcatctaatggaatggaatggaataatccatggactcgaatg

SEQ ID NO: 5518 - DNA, 102 bp, Homo sapiens
  source 1..102: mol_type = genomic DNA
ggaatcaaacggaattatcgaatggaatcgaagagaatcatagaacggactcaaatggaatcatctaatggaatggaatgggagaatccatggactcgaatg

SEQ ID NO: 5519 - DNA, 70 bp, Homo sapiens
  source 1..70: mol_type = genomic DNA
aatggaatcaatatcaaacggaaaaaaacggaattatcgaatggaatcgaagagaatcatcgaatggacc

SEQ ID NO: 5520 - DNA, 96 bp, Homo sapiens
  source 1..96: mol_type = genomic DNA
aacggaatcaaacggaattatcgaatggaatcgaaaagaatcatcgaacggactcgaatggaatcatctaatggaatggaatggaagaatccatgg

SEQ ID NO: 5521 - DNA, 90 bp, Homo sapiens
  source 1..90: mol_type = genomic DNA
aaacggaattatcgaatggaatcaaagagaatcatcgaatggccacgaatggaatcatataatggaatggaatggaataatccatggacc

SEQ ID NO: 5522 - DNA, 85 bp, Homo sapiens
  source 1..85: mol_type = genomic DNA
aatggaatcgaatggattgatatcaaatggaatggaatggaagggaatggaatggaatggaattgaaccaaatgtaatggatttg

SEQ ID NO: 5523 - DNA, 89 bp, Homo sapiens
  source 1..89: mol_type = genomic DNA
taaaagacggaacagatagaaagcagaaaggaaaggtgaattgcattaccactattcatactgccacacacatgacattaggccaagtc

SEQ ID NO: 5524 - DNA, 79 bp, Homo sapiens
  source 1..79: mol_type = genomic DNA
aatggaatcgaatggaacaatcaaatggactccaatggagtcatctaatggaatcgagtggaatcatcgaatggactcg

SEQ ID NO: 5525 - DNA, 102 bp, Homo sapiens
  source 1..102: mol_type = genomic DNA
taacacataaacaaacacagagacaaaatctccgagatgttaatctgctccagcaatacagaacaatttctattaccaacagaatgcttaatttttctgcct

SEQ ID NO: 5526 - DNA, 77 bp, Homo sapiens
  source 1..77: mol_type = genomic DNA
ggaatcgaatggaatcaacatcaaacggaaaaaaacggaattatcgaatggaatcaaagagaatcatcgaatggacc

SEQ ID NO: 5527 - DNA, 51 bp, Homo sapiens
  source 1..51: mol_type = genomic DNA
agaatggaaaggaatcgaaacgaaaggaatggagacagatggaatggaatg

SEQ ID NO: 5528 - DNA, 89 bp, Homo sapiens
  source 1..89: mol_type = genomic DNA
gaatcatcataaaatggaatcgaatggaatcaacatcaaatggaatcaaatggtctcgaatggaatcatcttcaaatggaatggaatgg

SEQ ID NO: 5529 - DNA, 127 bp, Homo sapiens
  source 1..127: mol_type = genomic DNA
aacaacaatgacaaacaaacaacaacgacaaagacatttatttggttcacaaatctccagggtgtacaagaagcatggtgccagcatctgctcagcttctgatgagggctctgggaagcttttactc

SEQ ID NO: 5530 - DNA, 96 bp, Homo sapiens
  source 1..96: mol_type = genomic DNA
aacggactcgaacggaatataatggaatggaatggattcgaaaggaatggaatggaatggacaggaaaagaattgaatgggattggaatggaatcg

SEQ ID NO: 5531 - DNA, 112 bp, Homo sapiens
  source 1..112: mol_type = genomic DNA
aacatcaaacgaaatcaaacggaattatcaaattgaatcgaagagaatcatcgaattgccacgaatgcaatcatctaatggtatggaatggaataatccatggacccagatg

SEQ ID NO: 5532 - DNA, 94 bp, Homo sapiens
  source 1..94: mol_type = genomic DNA
agaaattaacagcaaaagaaggatgcagtgcaactcaggacaacacatacaattcaagcaacaaatgtatagtggctgggcaccaaggatacag

SEQ ID NO: 5533 - DNA, 82 bp, Homo sapiens
  source 1..82: mol_type = genomic DNA
gcaataaaatcgactcagatagagaagaatgcaatggaatggaatggaatggaatggaatgggatggaatggtatggaatgg

SEQ ID NO: 5534 - DNA, 97 bp, Homo sapiens
  source 1..97: mol_type = genomic DNA
aatggactcgaatgaaatcatcatcaaacggaatcgaatggaatcattgaatggaaaggatgggatcatcatggaatggaaacgaatggaatcactg

SEQ ID NO: 5535 - DNA, 82 bp, Homo sapiens
  source 1..82: mol_type = genomic DNA
ccacataaaacaaaactacaagacaatgataaagttcacaacattaacacaatcagtaatggaaaagcctagtcaatggcag

SEQ ID NO: 5536 - DNA, 157 bp, Homo sapiens
  source 1..157: mol_type = genomic DNA
tggaatggaatggaatggaatcaaatcgcatggtaatgaatcaaatggaatcaaatcgaatggaaataatggaatcgaagggaaacgaatggaatcgaattgcactgattctactgacttcgaggaaaatgaaatgaaatgcggtgaagtggaatgg

SEQ ID NO: 5537 - DNA, 71 bp, Homo sapiens
  source 1..71: mol_type = genomic DNA
gaatgttatgaaatcaactcgaacggaatgcaatagaatggaatggaatggaatggaatggaatggaatgg

SEQ ID NO: 5538 - DNA, 104 bp, Homo sapiens
  source 1..104: mol_type = genomic DNA
aatggaatcattgaatggaatggaatggaatcatcaaagaaaggaatcgaagggaatcatcgaatggaatcaaacggaatcatcgaatggaatggaatggaatg

SEQ ID NO: 5539 - DNA, 68 bp, Homo sapiens
  source 1..68: mol_type = genomic DNA
ggaatcaacatcaaacggaaaaaaaacggaattatcgaatggaatcgaagagaatcatcgaatggacc

SEQ ID NO: 5540 - DNA, 69 bp, Homo sapiens
  source 1..69: mol_type = genomic DNA
ggaataatcatcatcaaacagaaccaaatggaatcattgaatggaatcaaaggcaatcatggtcgaatg

SEQ ID NO: 5541 - DNA, 108 bp, Homo sapiens
  source 1..108: mol_type = genomic DNA
gcatagaatcgaatggaattatcattgaatggaatcgaatggaatcaacatcaaacggaaaaaaacggaattatcgaatggaatcgaagagaatcatcgaatggaccc

SEQ ID NO: 5542 - DNA, 82 bp, Homo sapiens
  source 1..82: mol_type = genomic DNA
aatggaatcgaagagaatcatcgaacggactcgaatggaatcatctaatggaatggaatggaataatccatggacccgaatg

SEQ ID NO: 5543 - DNA, 99 bp, Homo sapiens
  source 1..99: mol_type = genomic DNA
aaatgaatcgaatggaattgaatggaatcaaatagaacaaatggaatcgaaatgaatcaaatggaatcgaatcgaatggaattgaatggcatggaattg

SEQ ID NO: 5544 - DNA, 79 bp, Homo sapiens
  source 1..79: mol_type = genomic DNA
agttaatccgaatagaatggaatggaatgcaatggaacggaatggaacggaatggaatggaatggaatggaatggaatg

SEQ ID NO: 5545 - DNA, 131 bp, Homo sapiens
  source 1..131: mol_type = genomic DNA
atcacaatcacacaacacattgcacatgcataacatgcactcacaatacacacacaacacatacacaacacacatgcaatacaacacaaaacgcaacacaacatatacacaacacacagcacacacatgcc

SEQ ID NO: 5546 - DNA, 87 bp, Homo sapiens
  source 1..87: mol_type = genomic DNA
aaagacttaaacgttagacctaaaaccataaaaaccctagaggaaaacctaggcattaccattcaggacttaggcatgggcaaggac

SEQ ID NO: 5547 - DNA, 108 bp, Homo sapiens
  source 1..108: mol_type = genomic DNA
aaagtccaaagatgaacaaaatatccagaaggaaaacaaatgcacttggggagtgggaaagaaaaccaagactgagcaatgcgtcaagctcagacgtgcctcactacg

SEQ ID NO: 5548 - DNA, 97 bp, Homo sapiens
  source 1..97: mol_type = genomic DNA
aaacggaatcaaacggaattatcgaatggagtcgaaaagaatcatcgaacggactcgaatggaatcatctaatggaatggaatggaagaatccatgg

SEQ ID NO: 5549 - DNA, 94 bp, Homo sapiens
  source 1..94: mol_type = genomic DNA
aattgattcgaaattaatggaattgaatggaatgcaatcaaatggaatggaatgtaatgcaatggaatgtaatagaatggaaagcaatggaatg

SEQ ID NO: 5550 - DNA, 79 bp, Homo sapiens
  source 1..79: mol_type = genomic DNA
tacagaacacatgactcaacaacagcagaaagcatattcttttcaaatgcacatgaaacattatcatgatggaccaaat

SEQ ID NO: 5551 - DNA, 65 bp, Homo sapiens
  source 1..65: mol_type = genomic DNA
ggaacaaaatgaaatcgaacggtaggaatcatacagaacagaaagaaatggaacggaatggaatg

SEQ ID NO: 5552 - DNA, 68 bp, Homo sapiens
  source 1..68: mol_type = genomic DNA
aacggaaaaaacggaattatcgaatggaatcgaagagaatcatcgaatggaatcgaatggagtcatcg

SEQ ID NO: 5553 - DNA, 75 bp, Homo sapiens
  source 1..75: mol_type = genomic DNA
aatcgaacggaatcaacatcaaacggaaaaaaacggaattatcgaatggaatcgaagagaatcatcgaatggacc

SEQ ID NO: 5554 - DNA, 87 bp, Homo sapiens
  source 1..87: mol_type = genomic DNA
agaatggaatgcaatagaatggaatgcaatggaatggagtcatccgtaatggaatggaaaggaatgcaatggaatggaatggaatgg

SEQ ID NO: 5555 - DNA, 165 bp, Homo sapiens
  source 1..165: mol_type = genomic DNA
atggaatcaacatcaaacggaatcaaacggaattatcgaatggaatcgaagagaatcatcgaacggattcgaatggaatcatctaatggaatggaatggaagaatccatggactcgaatgcaatcatcagcgaatggaatcgaatggaatcatcgaatggactcg

SEQ ID NO: 5556 - DNA, 98 bp, Homo sapiens
  source 1..98: mol_type = genomic DNA
ggaataaaacggactcaatagtaatggattgcaatgtaattgattcgatttcgaatggaatcgcatggaatgtaatggaatggaatggaatggaaggc

SEQ ID NO: 5557 - DNA, 70 bp, Homo sapiens
  source 1..70: mol_type = genomic DNA
aatggaatcaacatcaaacggaaaaaaacggaattatcgtatggaatcgaaaagaattatcgaatggacc

SEQ ID NO: 5558 - DNA, 57 bp, Homo sapiens
  source 1..57: mol_type = genomic DNA
tcaaacggaaaaaaacggaattatcgaatggaatcgaagagaatcatcgaatggacc

SEQ ID NO: 5559 - DNA, 111 bp, Homo sapiens
  source 1..111: mol_type = genomic DNA
acatcaaacggaatcaaacggaattatcgaatggaatcgaaaagaatcatcgaacggactcgaatggaatcatctaatggaatggaatggaagaatccatggactcgaatg

SEQ ID NO: 5560 - DNA, 78 bp, Homo sapiens
  source 1..78: mol_type = genomic DNA
tggaatcgaatggaatcaacatcaaacggaaaaaaacggaattatcgaatggaatcgaagagaatcatcgaatggacc

SEQ ID NO: 5561 - DNA, 76 bp, Homo sapiens
  source 1..76: mol_type = genomic DNA
aatggaatcgaatgcaatcatcgaacggaatcgaatggcatcaccgaatggaatggaatggaatggaatggaatgg

SEQ ID NO: 5562 - DNA, 87 bp, Homo sapiens
  source 1..87: mol_type = genomic DNA
agaattgattgaatccaagtggaattgaatggaatggaatggattagaaaggaatggaatggattggaatggattggaatggaaagg

SEQ ID NO: 5563 - DNA, 96 bp, Homo sapiens
  source 1..96: mol_type = genomic DNA
aactgcatcaactaacaggcaaaataaccagctaatatcataatgacaggattaaattcacaaatgacaatattaaccgtaaatgtaaatgggcta

SEQ ID NO: 5564 - DNA, 108 bp, Homo sapiens
  source 1..108: mol_type = genomic DNA
gtaaacaaacaatcaagcaagtaagaacagaaataacagcatttggcttttgagttaatgacaagaacactcggcatgggagcctgggtgagcaaatcacagatcttc

SEQ ID NO: 5565 - DNA, 84 bp, Homo sapiens
  source 1..84: mol_type = genomic DNA
aaaggaatggactggaacaaaatgaaatcgaacggtaggaatcgtacagaacggacagaaatggaacggcatggaatgcactcg

SEQ ID NO: 5566 - DNA, 91 bp, Homo sapiens
  source 1..91: mol_type = genomic DNA
gaatcaacccgagcggaaaggaatggaatggaatggaatcaacacgaatggaatggaacggaatggaatgggatgggatgaaatggaatgg

SEQ ID NO: 5567 - DNA, 71 bp, Homo sapiens
  source 1..71: mol_type = genomic DNA
aagaaatggaatcgaagagaatggaaacaaacggaatggaattgaatggaatggaattgaatggaatggga

SEQ ID NO: 5568 - DNA, 101 bp, Homo sapiens
  source 1..101: mol_type = genomic DNA
gacatgcaaacacaacacacagcacacatggaacatgcatcagacatgcaaacacaacacacataccacacatggcatatgcatcagacgtgcctcactac

SEQ ID NO: 5569 - DNA, 135 bp, Homo sapiens
  source 1..135: mol_type = genomic DNA
aaaggaatgcactcgaatggaatggacttgaatggaatgtctccgaatggaacagactcgtatgaaatggaatcgaatggaatggaatcaaatggaattgatttgagtgaaatggaatcaaatggaatggcaacg

SEQ ID NO: 5570 - DNA, 89 bp, Homo sapiens
  source 1..89: mol_type = genomic DNA
ggaacaaaatgaaatcgaacggtaggaatcgtacagaacggaaagaaatggaacggaatggaatgcactcgaatggaaaggagtccaat

SEQ ID NO: 5571 - DNA, 95 bp, Homo sapiens
  source 1..95: mol_type = genomic DNA
aaattgattgaaatcatcataaaatggaatcgaagggaatcaacatcaaatggaatcaaatggaatcattgaacggaattgaatggaatcgtcat

SEQ ID NO: 5572 - DNA, 84 bp, Homo sapiens
  source 1..84: mol_type = genomic DNA
agaatggaaagcaatagaatggaacgcactggattcgagtgcaatggaatcaattggaatggaatcgaatggaatggattggca

SEQ ID NO: 5573 - DNA, 103 bp, Homo sapiens
  source 1..103: mol_type = genomic DNA
aacaccaaacggaaaaaaacggaattatcgaatggaatcgaagagaatcttcgaacggacccgaatgggatcatctaatggaatggaatggaataatccatgg

SEQ ID NO: 5574 - DNA, 94 bp, Homo sapiens
  source 1..94: mol_type = genomic DNA
aatggagactaatgtaatagaatcaaatggaatggcatcgaatggaatggactggaatggaatgtgcatgaatggaatggaatcgaatggattg

SEQ ID NO: 5575 - DNA, 151 bp, Homo sapiens
  source 1..151: mol_type = genomic DNA
aaatcgaatggaacgcaatagaatagactcgaatgtaatggattgctatgtaattgattcgaatggaatggaatcgactggaatgcaatccaatggaatggaatgcaatgcaatggaatggaatcgaacggaatgcagtggaagggaatgg

SEQ ID NO: 5576 - DNA, 107 bp, Homo sapiens
  source 1..107: mol_type = genomic DNA
aatcaacaaggaactgaaacaagtaaacaagaaaacaaataacaccataaaacatgggcaaaggacataaacagacatttttcaaaaaagacatacaaatggccgag

SEQ ID NO: 5577 - DNA, 89 bp, Homo sapiens
  source 1..89: mol_type = genomic DNA
aatggaatcaacatcaaacggaaaaaaacggaattatcgaatggaatcgaagagaatcatcgaatggacccaggctggtcttgaactcc

SEQ ID NO: 5578 - DNA, 82 bp, Homo sapiens
  source 1..82: mol_type = genomic DNA
attgaatgggctagaatggaatcatctttgaacggaatcaaagggaatcatcatcgaatggaatcgaatggaaatgtcaacg

SEQ ID NO: 5579 - DNA, 143 bp, Homo sapiens
  source 1..143: mol_type = genomic DNA
aatggactcgaatggaatcaacatcaaatggaatcaagcggaattatcgaatgaaatcgaagagaatcatcgaatggactcgaaaggaatcatctaatggaatggaatggaataatccatggactcgaatgcaatcatcatcg

SEQ ID NO: 5580 - DNA, 97 bp, Homo sapiens
  source 1..97: mol_type = genomic DNA
aaacggaaaaaaacggaattattgaatggaatcgaagagaatcttcgaacggacccgaatggaatcatctaatggaatggaatggaataatccatgg

SEQ ID NO: 5581 - DNA, 79 bp, Homo sapiens
  source 1..79: mol_type = genomic DNA
actcgagtggaattgactgtaacaaaatggaaagtaacggattggaatcgaatggaacggaatggaatggaatggacat

SEQ ID NO: 5582 - DNA, 120 bp, Homo sapiens
  source 1..120: mol_type = genomic DNA
tacaaactttaaaaaatgatcaacagatacacagttagcaagaaagaattgagggcaaagaatatgccagacaaactcaagaggaagatgatggtagagataggtcacattggagtgtca

SEQ ID NO: 5583 - DNA, 66 bp, Homo sapiens
  source 1..66: mol_type = genomic DNA
aaatcaacaacaaacggaaaaaaaaggaattatcgaatggaatcaaagagaatcatcgaatggacc

SEQ ID NO: 5584 - DNA, 105 bp, Homo sapiens
  source 1..105: mol_type = genomic DNA
aacggaatcaaacggaattatcgaatggaatcgaaaagaatcatcgaacggactcgaatggaatcatctaatgtaatggaatggaagaatccatggactcgaatg

SEQ ID NO: 5585 - DNA, 105 bp, Homo sapiens
  source 1..105: mol_type = genomic DNA
aacggaaaaaaacggaattatcgaatggaatcgaagagaatcatcgaatggaccagaatggaatcatctaatggaatggaatggaataatccatggactcgaatg

SEQ ID NO: 5586 - DNA, 103 bp, Homo sapiens
  source 1..103: mol_type = genomic DNA
caacatcaaacggaaaaaaacggaattatggaatggaatcgaagagaatcatcgaatggacccgaatggaatcatctgaaatataatagactcgaaaggaatg

SEQ ID NO: 5587 - DNA, 78 bp, Homo sapiens
  source 1..78: mol_type = genomic DNA
atggaatcgaatggaatggactggaatggaatggattcgaatggaatcgaatggaacaatatggaatggtaccaaatg

SEQ ID NO: 5588 - DNA, 71 bp, Homo sapiens
  source 1..71: mol_type = genomic DNA
gaatggaatcaacatcaaacggaaaaaaacggaattatcgaatggaatcgaagagaatcatcgaatggacc

SEQ ID NO: 5589 - DNA, 89 bp, Homo sapiens
  source 1..89: mol_type = genomic DNA
aaatggactcgaatggaatcatcatagaatggaatcgaatgcaatggaatggaatcttccggaatggaatggaatggaatggaatggag

SEQ ID NO: 5590 - DNA, 85 bp, Homo sapiens
  source 1..85: mol_type = genomic DNA
gaatcatcataaaatggaatcgaatggaatcaacatcaaatggaatcaaatggaatcattgaacggaattgaatggaatcgtcat

SEQ ID NO: 5591 - DNA, 74 bp, Homo sapiens
  source 1..74: mol_type = genomic DNA
atcgaatggaatcaacatcaaacggaaaaaaacggaattatcgaatggaatcgaagagaatcatcgaatggacc

SEQ ID NO: 5592 - DNA, 92 bp, Homo sapiens
  source 1..92: mol_type = genomic DNA
agcaacttcagcaaagtctcaggatacaaaatcaatgtacaaaaatcacaagcattcttatacaccaataacagacaaacagagagccaaaa

SEQ ID NO: 5593 - DNA, 89 bp, Homo sapiens
  source 1..89: mol_type = genomic DNA
agaaacagaaaacagtcaaaccaatgggcaatccatatcagatgcagtattatgaacagaagtgtaaagaatgcaccaggcacaatggc

SEQ ID NO: 5594 - DNA, 131 bp, Homo sapiens
  source 1..131: mol_type = genomic DNA
gattggaacgaaatcgaatggaacggaatagaatagactcgaatgtaatggattgctatgtaattgattcgaatggaatggaatcgaatggaatgcaatccaatggaatggaatgcaatgcaatggaatgg

SEQ ID NO: 5595 - DNA, 126 bp, Homo sapiens
  source 1..126: mol_type = genomic DNA
atggaatggaataatcaacgtactcgaatgcaatcatcatcgtatagaatcgaatggaatcatcgaatggactcgaatggaataatcattgaacggagtcgaatggaatcatcatcggatggaaac

SEQ ID NO: 5596 - DNA, 95 bp, Homo sapiens
  source 1..95: mol_type = genomic DNA
aaagaaatcgaatggaatcagtgtcgaatggaatggaatggaatcgaagaattgaattgagtagaatcgaagggaatcattggatgggctcaaat

SEQ ID NO: 5597 - DNA, 77 bp, Homo sapiens
  source 1..77: mol_type = genomic DNA
agaaaagataactcgattaacaaatgaacaaacacctgaatacacaagtctcaaaagaagacataaaaatggccaac

SEQ ID NO: 5598 - DNA, 102 bp, Homo sapiens
  source 1..102: mol_type = genomic DNA
atggaatcaacatcaaacggaatcacacggaattatcgaatggaatcgaaaagaatcatcgaacggactcgaatggaatcatctaatggaatggaatggaag

SEQ ID NO: 5599 - DNA, 103 bp, Homo sapiens
  source 1..103: mol_type = genomic DNA
aatggaatcaacatcaaacggaatcaagcgaaattatcgaatggaatcgaagagaatcatcgaatggactcgaatggaatcatctaatggaatggaatgggat

SEQ ID NO: 5600 - DNA, 82 bp, Homo sapiens
  source 1..82: mol_type = genomic DNA
aaacacagtacaaatactaattcaaatcaaacttactcaaagtcataatcaaacatgccagacgggctgaggggcagcatta

SEQ ID NO: 5601 - DNA, 100 bp, Homo sapiens
  source 1..100: mol_type = genomic DNA
ggaatcgagtggaatcatcgaaagaaatcgaatggaatcattgtcgaatggaatggaatggaatcaaagaatggaatcgaagggaatcattggatgggct

SEQ ID NO: 5602 - DNA, 139 bp, Homo sapiens
  source 1..139: mol_type = genomic DNA
aaagaaagacagagaacaaacgtaattcaagatgactgtttacatatccaagaacattagatggtcaaagactttaagaaggaatacattcaaaggcaaaaagtcacttactgattttggtggagtttgccacatggac

SEQ ID NO: 5603 - DNA, 148 bp, Homo sapiens
  source 1..148: mol_type = genomic DNA
gaaaggaatcatcattgaatgcaatcacatggaatcatcacagaatggaatcgtacggaatcatcatcgaatggaattgaatggaatcatcaattggactcgaatggaatcatcaaatggaatcgattggaagtgtcaaatggactcg

SEQ ID NO: 5604 - DNA, 57 bp, Homo sapiens
  source 1..57: mol_type = genomic DNA
caatcagagcggacacaaacaaattgcatgggaagaatcaatatcgtgaaaatggcc

SEQ ID NO: 5605 - DNA, 72 bp, Homo sapiens
  source 1..72: mol_type = genomic DNA
cagcgcaccacagcacacacagtatacacatgacccacaatacacacaacacacaacacattcacacaccac

SEQ ID NO: 5606 - DNA, 87 bp, Homo sapiens
  source 1..87: mol_type = genomic DNA
gcaaacagaattcaacactacattagaacgatcattcatcacgacctagtaggatgtttttcctgggatgcaaggatggttcaacat

SEQ ID NO: 5607 - DNA, 71 bp, Homo sapiens
  source 1..71: mol_type = genomic DNA
caatcaaaacagcaatgagataccattttacaccaatcaaaatggctactaaaaagtcaaaagcaaatgcc

SEQ ID NO: 5608 - DNA, 93 bp, Homo sapiens
  source 1..93: mol_type = genomic DNA
tggaatagaatggaatcaatgttaagtggaatcgagtggaatcatcgaaagaaatcgaatggaatcattgtcgaatggtatggaatggaatca

SEQ ID NO: 5609 - DNA, 124 bp, Homo sapiens
  source 1..124: mol_type = genomic DNA
aatggaatggaatcatcgcatagaatggaatggaattatcatcgaattgaatcgaatggtatcaacatcaaacggaaaaaaacggaaatatcgaatggaatcgaagagaatcatcgaacggacc

SEQ ID NO: 5610 - DNA, 90 bp, Homo sapiens
  source 1..90: mol_type = genomic DNA
gaaaaacaaaacaaaacaaacaaacaaacaatcaaaaaagtggtagcagaaaccagaaagtccatgtatatagctaattggcctggttgt

SEQ ID NO: 5611 - DNA, 80 bp, Homo sapiens
  source 1..80: mol_type = genomic DNA
agacctttctcagaagacacacaaattgccaacaggtatatgaaaaaatgttcaatatcactaatcatcagggcgatgcc

SEQ ID NO: 5612 - DNA, 106 bp, Homo sapiens
  source 1..106: mol_type = genomic DNA
catggaatcgaatggaattatcatcgaatggaatcgaatggtaccaacaccaaacggaaaaaaacggaattatcgaatggaatcgaagagaatcttcgaacggacc

SEQ ID NO: 5613 - DNA, 87 bp, Homo sapiens
  source 1..87: mol_type = genomic DNA
agagcagaaacaaatggaattgaaatgaagacaacaatcaaaagcatcaatgaaatgaaaagttgggttttggaagagagaaacaat

SEQ ID NO: 5614 - DNA, 70 bp, Homo sapiens
  source 1..70: mol_type = genomic DNA
acacaaacacacacacacacacacacacacacacacacacacacacacacacacacacacacacacatac

SEQ ID NO: 5615 - DNA, 107 bp, Homo sapiens
  source 1..107: mol_type = genomic DNA
aacaaacaaatgagatgatttcagatagtgataaacactataacataattaattcgtgccaatcagagcataacagtggtgtggtggctgtggaacagatagcagac

SEQ ID NO: 5616 - DNA, 79 bp, Homo sapiens
  source 1..79: mol_type = genomic DNA
aatggaatcgagtggaatggaaggcaatggaatagaatggaatggaatcgaaaggaacggaatggaatggaatggaatg

SEQ ID NO: 5617 - DNA, 73 bp, Homo sapiens
  source 1..73: mol_type = genomic DNA
agaaatggaatcggagagaatggaaacaaatggaatggaattgaatggaatggaattgaatggaatgggaacg

SEQ ID NO: 5618 - DNA, 87 bp, Homo sapiens
  source 1..87: mol_type = genomic DNA
aagagaactgcaaaacactgctcaaagaaatcagagatgacaaaaacacatggaaaaacgtttcatgctcatggattggaagactta

SEQ ID NO: 5619 - DNA, 83 bp, Homo sapiens
  source 1..83: mol_type = genomic DNA
aatcaacacgaatagaatggaacggaatggaatggaatggaatggaatggaatggagtggaatggaacagaatggagtggaat

SEQ ID NO: 5620 - DNA, 112 bp, Homo sapiens
  source 1..112: mol_type = genomic DNA
aacatcaaacgaaatcaaacggaattatcaaattgaatcgaagagaatcatcgaattgccacgaatgcaaccatctaatggtatggaatggaataatccatggacccagatg

SEQ ID NO: 5621 - DNA, 94 bp, Homo sapiens
  source 1..94: mol_type = genomic DNA
cggaattatcatcgaatgtaatcgaatggaatcaacatcaaacggaaaaaaacggaattatcgaatggaatcgaagagaatcatcgaatggacc

SEQ ID NO: 5622 - DNA, 125 bp, Homo sapiens
  source 1..125: mol_type = genomic DNA
tggacacacacgaacacacacctacacacacgtggacacacacggacacatggacacacacgaacacatggacacacacacggggacacacacagacacacacagagacacacacggacacatgg

SEQ ID NO: 5623 - DNA, 100 bp, Homo sapiens
  source 1..100: mol_type = genomic DNA
atcaaacggaatcaaacggaattatcgaatggaatcgaagagaatcatcgaatggactcgaatggaatcatctaatggaatggaatggaagaatccatgg

SEQ ID NO: 5624 - DNA, 99 bp, Homo sapiens
  source 1..99: mol_type = genomic DNA
aaatggaatggaatgcacttgaaaggaatagactggaacaaaatgaaatcgaacggtaggaatcatacagaacagaaagaaatggaacggaatggaatg

SEQ ID NO: 5625 - DNA, 68 bp, Homo sapiens
  source 1..68: mol_type = genomic DNA
accacacacaaaatacaccacacaccacacacacaccacacactatacacacaccacacaccacacac

SEQ ID NO: 5626 - DNA, 100 bp, Homo sapiens
  source 1..100: mol_type = genomic DNA
aaagaaatagaagggagttgaacagaatcgaatggaatcgaatcaaatggaatcgaatggcatcaaatggaatcgaatggaatgtggtgaagtggattgg

SEQ ID NO: 5627 - DNA, 86 bp, Homo sapiens
  source 1..86: mol_type = genomic DNA
ggaatcatcataaaatggaatcgaatggaatcatcatcaaatggaatcaaatggaatcattgaacggaattgaatggaatcgtcat

SEQ ID NO: 5628 - DNA, 80 bp, Homo sapiens
  source 1..80: mol_type = genomic DNA
aaagatcaatgtacaaaaatcagcagcatttctataaaccaacaatgtccaggctgagagagaaatcaagaaaacaattc

SEQ ID NO: 5629 - DNA, 77 bp, Homo sapiens
  source 1..77: mol_type = genomic DNA
tggaatggaatggaatgaaataaacacgaatagaatggaacggaatggaacggaatggaatggaatggaatggaaag

SEQ ID NO: 5630 - DNA, 92 bp, Homo sapiens
  source 1..92: mol_type = genomic DNA
taatcagcacaatcaactgtagtcacaaaacaaatagtaacgcaatgataaagaaacagagaactagttcaaataaacatgataagatgggg

SEQ ID NO: 5631 - DNA, 78 bp, Homo sapiens
  source 1..78: mol_type = genomic DNA
aagcggaattatcaaatggaatcgaagagaatggaaacaaatggaatggaattgaatggaatggaattgaatggaatg

SEQ ID NO: 5632 - DNA, 70 bp, Homo sapiens
  source 1..70: mol_type = genomic DNA
aatggaatcaacatcaaacggaaaaaaacggaattatcgaatggaatcgaagagaatcatcgaatggacc

SEQ ID NO: 5633 - DNA, 92 bp, Homo sapiens
  source 1..92: mol_type = genomic DNA
acttgaatcgaatggaaaggaatttaatgaacttaaatcgaatggaatataatggtatggaatggactcatggaatggaatggaaaggaatc

SEQ ID NO: 5634 - DNA, 91 bp, Homo sapiens
  source 1..91: mol_type = genomic DNA
tggaatcatcatcgaaagcaagcgaatggaatcatcaaatggaaacgaatggaatcatcgaatggactcggatggaattgttgaatggact

SEQ ID NO: 5635 - DNA, 68 bp, Homo sapiens
  source 1..68: mol_type = genomic DNA
tggaatcaacatcaaacggaaaaaaacggaattatcgaatggaatcgaagagaatcatcgaatggacc

SEQ ID NO: 5636 - DNA, 86 bp, Homo sapiens
  source 1..86: mol_type = genomic DNA
taagtgaattgaatagaatcaatctgaatgtaatgaaatggaatggaacggaatggaatggaatggaatggaatggaatggaatgg

SEQ ID NO: 5637 - DNA, 98 bp, Homo sapiens
  source 1..98: mol_type = genomic DNA
aggaaaatttaatcagcaggaatagaaacacacttgagaaatccatgtggaatgaaaagagaatggctgagcagcaacagattgtcaaaaaggaaatc

SEQ ID NO: 5638 - DNA, 62 bp, Homo sapiens
  source 1..62: mol_type = genomic DNA
aacatcaaacggaaaaaaaacggaattatcgaatggaatcgaagagaatcatcgaatggacc

SEQ ID NO: 5639 - DNA, 132 bp, Homo sapiens
  source 1..132: mol_type = genomic DNA
taattgagaataagcattccagtggaaaaaaaactaaacaatttgttgtaaaacatccttaaaagcatcagaaagttaatacagcaatgaagaattacaggaccaaattaagaatggtatggaagcctgtta

SEQ ID NO: 5640 - DNA, 88 bp, Homo sapiens
  source 1..88: mol_type = genomic DNA
tatcatcgaatggaatcgaatggaatcaacatcaaacggaaaaaaacggaattatcgaattgaatcgaagagaatcatcgaatggacc

SEQ ID NO: 5641 - DNA, 80 bp, Homo sapiens
  source 1..80: mol_type = genomic DNA
agcaaaacaaacacaatctgtcgttcatggtactacgacatactgggagagatattcaaatgatcacacaaaacaacatg

SEQ ID NO: 5642 - DNA, 93 bp, Homo sapiens
  source 1..93: mol_type = genomic DNA
aaggattcgaatggaatgaaaaagaattgaatggaatagaacagaatggaatcaaatcgaatgaaatggagtggaatagaaaggaatggaatg

SEQ ID NO: 5643 - DNA, 147 bp, Homo sapiens
  source 1..147: mol_type = genomic DNA
aacggaatcaaacggaattatcgaatggaatcgaagagaatcatcgaacggactcgaatggaatcatctaatggaatggaatggaagaatccatggactcgaatgcaatcatcatcgaatggaatcgaacggaatcatcgaatggcc

SEQ ID NO: 5644 - DNA, 85 bp, Homo sapiens
  source 1..85: mol_type = genomic DNA
aatcaactagatgtcaatggaatgcaatggaatagaatggaatggaattaacacgaatagaatggaatggaatggaatggaatgg

SEQ ID NO: 5645 - DNA, 88 bp, Homo sapiens
  source 1..88: mol_type = genomic DNA
aatggactcgaatggaataatcattgaacggaatcgaatggaatcatcatcggatggaaatgaatggaatcatcatcgcatggaatcg

SEQ ID NO: 5646 - DNA, 76 bp, Homo sapiens
  source 1..76: mol_type = genomic DNA
gaatggaatgatacggaatagaatggaatggaacgaaatggaattgaaaggaaaggaatggaatggaatggaatgg

SEQ ID NO: 5647 - DNA, 84 bp, Homo sapiens
  source 1..84: mol_type = genomic DNA
aatcatcatcgaatggaatcgaatggtatcattgagtggaatcgaatggaatcatcatcagatggaaatgaatggaatcgtcat

SEQ ID NO: 5648 - DNA, 65 bp, Homo sapiens
  source 1..65: mol_type = genomic DNA
gaatcaaatcaatggaatcaaatcaaatggaatggaatggaattgtatggaatggaatggcatgg

SEQ ID NO: 5649 - DNA, 125 bp, Homo sapiens
  source 1..125: mol_type = genomic DNA
taatgcagtccaatagaatggaatcgaatggcatggaatataaagaaatggaatcgaagagaatgggaacaaatggaatggaattgagtggaatggaattgaatggaatgggaacgaatggagtg

SEQ ID NO: 5650 - DNA, 61 bp, Homo sapiens
  source 1..61: mol_type = genomic DNA
aacatcaaacggaaaaaaacggaattatcgaatggaatcgaagagaatcatcgaatggacc

SEQ ID NO: 5651 - DNA, 99 bp, Homo sapiens
  source 1..99: mol_type = genomic DNA
atcaaaaggaacggaatggaatggaatggaatggaatggaatggaatggaatggaatgaaatcaacccgaatggaatggattggcatagagtggaatgg

SEQ ID NO: 5652 - DNA, 80 bp, Homo sapiens
  source 1..80: mol_type = genomic DNA
gccaacaatcatatgagaaaaagctcaacatcactgatcatttcaggaatgcaaatcaaaaccacaatgagatactatca

SEQ ID NO: 5653 - DNA, 99 bp, Homo sapiens
  source 1..99: mol_type = genomic DNA
aatcaaatggaatgaaatcgaatggaattgaatcgaatggaatgcaatagaatgtcttcaaatggaatcgaatggaaattggtgaagtggacgggagtg

SEQ ID NO: 5654 - DNA, 71 bp, Homo sapiens
  source 1..71: mol_type = genomic DNA
taatggaatcaacatcaaacggaaaaaaacggaattatcgaatgcaatcgaagagaatcatcgaatggacc

SEQ ID NO: 5655 - DNA, 88 bp, Homo sapiens
  source 1..88: mol_type = genomic DNA
agcaacttcagcaaagtctcagcatacaaaatcaatgtgcaaaaatcacacgcattcctatacaccaataacagacaaacagagagcc

SEQ ID NO: 5656 - DNA, 70 bp, Homo sapiens
  source 1..70: mol_type = genomic DNA
gaatcaaatggaatggactgtaatggaatggattcgaatggaatcgaatggagtggactcaaatggaatg

SEQ ID NO: 5657 - DNA, 93 bp, Homo sapiens
  source 1..93: mol_type = genomic DNA
aacaagtggacgaaggatatgaacagacacttctcaagacatttatgcagccaacagacacacgaaaaaatgctcatcatcactggccatcag

SEQ ID NO: 5658 - DNA, 55 bp, Homo sapiens
  source 1..55: mol_type = genomic DNA
aaacggaaaaaaacggaattatcgaatggaatcgaatagaatcatcgaatggacc

SEQ ID NO: 5659 - DNA, 105 bp, Homo sapiens
  source 1..105: mol_type = genomic DNA
tggaaccgaacaaagtcatcaccgaatggaattgaaatgaatcataatcgaatggaatcaaatggcatcttcgaattgactcgaatgcaatcatccactgggctt

SEQ ID NO: 5660 - DNA, 84 bp, Homo sapiens
  source 1..84: mol_type = genomic DNA
aacggaatcacgcggaattatcgaatggaatcgaagagaatcatcgaatggactcgaatggaatcatctaatggaatggaatgg

SEQ ID NO: 5661 - DNA, 96 bp, Homo sapiens
  source 1..96: mol_type = genomic DNA
ggaatcaactcgattgcaatggaatgcaatggaaaggaatggaatgcaattaaagcgaatagaatggaatggaatggaatggaacggaatggaatg

SEQ ID NO: 5662 - DNA, 68 bp, Homo sapiens
  source 1..68: mol_type = genomic DNA
aaaacaaacaacaacgacaaatcatgagaccagagttaagaaacaatgagaccaggctgggtgtggtg

SEQ ID NO: 5663 - DNA, 80 bp, Homo sapiens
  source 1..80: mol_type = genomic DNA
aatcgaaaggaatgcaatattattgaacagaatcgaaaagaatggaatcaaatggaatggaacagagtggaatggactgc

SEQ ID NO: 5664 - DNA, 79 bp, Homo sapiens
  source 1..79: mol_type = genomic DNA
aaggaatcgaatggaagtgaatgaaattgaatcaacaggaatggaagggaatagaatagactgtaatggaatggactcg

SEQ ID NO: 5665 - DNA, 65 bp, Homo sapiens
  source 1..65: mol_type = genomic DNA
aacccgagtgcaatagaatggaatcgaatggaatggaatggaatggaatggaatggaatggagtc

SEQ ID NO: 5666 - DNA, 80 bp, Homo sapiens
  source 1..80: mol_type = genomic DNA
gaatggaattgaaaggaatggaatgcaatggaatggaatgggatggaatggaatgcaatggaatcaactcgattgcaatg

SEQ ID NO: 5667 - DNA, 101 bp, Homo sapiens
  source 1..101: mol_type = genomic DNA
gaaaaaaacggaattatcgaattgaatcaaatagaatcatcgaacggaccaaaatggaatcatctaatggaatggaatggaataatccatggactctaatg

SEQ ID NO: 5668 - DNA, 132 bp, Homo sapiens
  source 1..132: mol_type = genomic DNA
tggaatcatctaatggaatggaatggaataatccatggactcgaatgcaatcatcataaaatggaatcgaatggaatcaacatcaaatggaatcaaatgggatcattgaacggaattgaatggaatcgtcat

SEQ ID NO: 5669 - DNA, 101 bp, Homo sapiens
  source 1..101: mol_type = genomic DNA
gaaaaaaacggaattatcgaattgaatcgaatagaatcatcgaacggaccagaatggaatcatctaatggaatggaatggaataatccatggactcgaatg

SEQ ID NO: 5670 - DNA, 91 bp, Homo sapiens
  source 1..91: mol_type = genomic DNA
aaccactgcttaaggaaataagagagaacacaaacaaatggaaaaacgttccatgctcatggataggagaatcaatatcgtgaaaatggcc

SEQ ID NO: 5671 - DNA, 95 bp, Homo sapiens
  source 1..95: mol_type = genomic DNA
tatcgaatggaatggaaaggagtggagtagactcgaatagaatggactggaatgaaatagattcgaatggaatggaatggaatgaagtggactcg

SEQ ID NO: 5672 - DNA, 84 bp, Homo sapiens
  source 1..84: mol_type = genomic DNA
gtatcaacatcaaacggaaaaaaacggaattatcgaatggaatcatctaatggaatggaatggaataatccatggactcgaatg

SEQ ID NO: 5673 - DNA, 87 bp, Homo sapiens
  source 1..87: mol_type = genomic DNA
taaatggagacatcattgaatacaattgaatggaatcatcacatggaatcgaatggaatcatcgtaaatgcaatcaagtggaatcat

SEQ ID NO: 5674 - DNA, 83 bp, Homo sapiens
  source 1..83: mol_type = genomic DNA
gaatggaattgaaaggtatcaacaccaaacggaaaaaaaaacggaattatcgaatggaatcgaagagaatcatcgaacggacc

SEQ ID NO: 5675 - DNA, 73 bp, Homo sapiens
  source 1..73: mol_type = genomic DNA
agcaatttcagcaaagtctcaggatacaaaatcaatgtacaaattcacaagcattcttatggaccaacaacag

SEQ ID NO: 5676 - DNA, 68 bp, Homo sapiens
  source 1..68: mol_type = genomic DNA
ggaatcgaatggcatcaacatcaaacggaaaaaaacggaattatcgaatggaatcgaatggaatcatc

SEQ ID NO: 5677 - DNA, 90 bp, Homo sapiens
  source 1..90: mol_type = genomic DNA
aaacaaaacacagaaatgcaaagacaaaacataaaacgcagccataaaggacatattttagataactggggaaatttgtatgggctgtgt

SEQ ID NO: 5678 - DNA, 103 bp, Homo sapiens
  source 1..103: mol_type = genomic DNA
aatggaatcaacatcaaacggaatcaaacggaattatcgaatggaatcgaagagaatcatcgaacggactcgaatggaatcatctaatggaatggaatggaag

SEQ ID NO: 5679 - DNA, 75 bp, Homo sapiens
  source 1..75: mol_type = genomic DNA
aatcgaatggaatcagcatcaaacggaaaaaaacggaattatcgaatggaatcgaagagaatcatcgaatggacc

SEQ ID NO: 5680 - DNA, 94 bp, Homo sapiens
  source 1..94: mol_type = genomic DNA
aaacggaattatagaatggactggaagagaatcatcgaacggactagaatggaatcatctaatcgaatggaatggaacaatccatggtctagca

SEQ ID NO: 5681 - DNA, 105 bp, Homo sapiens
  source 1..105: mol_type = genomic DNA
tgaacagagaattggacaaaacgcacaaagtaaagaaaaagaatgaagcaacaaaagcagagatttattgaaaacaaaagtacacaccacacagggtgggagtgg

SEQ ID NO: 5682 - DNA, 99 bp, Homo sapiens
  source 1..99: mol_type = genomic DNA
atcataacgacaagaacaaattcacacacaacaatattaacttcaaatccaaatgggttaaatgctccaattaaaggatgcagacgggcaaattggata

SEQ ID NO: 5683 - DNA, 99 bp, Homo sapiens
  source 1..99: mol_type = genomic DNA
atcataacgacaagaacaaattcacacacaacaatattcacttcaaatccaaatgggttaaatgctccaattaaaggatgcagacgggcaaattggata

SEQ ID NO: 5684 - DNA, 94 bp, Homo sapiens
  source 1..94: mol_type = genomic DNA
gaatggaatcgaatggattgatatcaactggaatggaatggaagggaatggaatggaatggaattgaaccaaatgtaatgacttgaatggaatg

SEQ ID NO: 5685 - DNA, 66 bp, Homo sapiens
  source 1..66: mol_type = genomic DNA
gaatcaacatcaaacggaaaaaaacggaattatcgaatggaatcgaagagaatcatcgaatggacc

SEQ ID NO: 5686 - DNA, 67 bp, Homo sapiens
  source 1..67: mol_type = genomic DNA
ggaatcaacatcaaacggaaaaaaacggaattatcgaatggaatcgaagagaatcatcgaatggacc

SEQ ID NO: 5687 - DNA, 135 bp, Homo sapiens
  source 1..135: mol_type = genomic DNA
atggaatcaacatcaaacggaatcaaacggaattatcgaatggaatcaaagagaatcatcgaacggactcgaatggaatcatctaatggaatggaatggaagaatccatggactcgaatgcaatcatcatcgaat

SEQ ID NO: 5688 - DNA, 52 bp, Homo sapiens
  source 1..52: mol_type = genomic DNA
ggaatggaatggaatggagccgaatggaatggaatgtactcaaatggaatgc

SEQ ID NO: 5689 - DNA, 150 bp, Homo sapiens
  source 1..150: mol_type = genomic DNA
aaaacacctaggaatacagataacaagggacattaactacctcttaaagagaactacaaaccactgctcaaggaaatgagagaggacacaaacacatggaaaaacattccatcctcatggataggaagaatcaatattgtgaaaatggcc

SEQ ID NO: 5690 - DNA, 98 bp, Homo sapiens
  source 1..98: mol_type = genomic DNA
aacacgactttgagaagagtaagtgattgttaattaaagcaagagaattattgatgtatcacagtcatgagaaatattggaaggaatatggtccatac

SEQ ID NO: 5691 - DNA, 66 bp, Homo sapiens
  source 1..66: mol_type = genomic DNA
acacatatcaaacaaacaaaagcaattgactatctagaaatgtctgggaaatggcaagatattaca

SEQ ID NO: 5692 - DNA, 86 bp, Homo sapiens
  source 1..86: mol_type = genomic DNA
ggaatcatcatataatggaatcgaatggaatcaacatcaaatggaatcaaatggaatcattgaacggaattgaatggaatcgtcat

SEQ ID NO: 5693 - DNA, 206 bp, Homo sapiens
  source 1..206: mol_type = genomic DNA
aatggaatcaacatcaaacggaatcaaatggaattatcgaatggaatcgaagagaatcatcgaattgtcacgaatggaatcatctaatggaatggaatggaataatccatggcccctatgcaatggactcgaatgaaatcatcatcaaacagaatcgaatggaatcatctaatggaatggaatggcataatccatggactcgaatg

SEQ ID NO: 5694 - DNA, 91 bp, Homo sapiens
  source 1..91: mol_type = genomic DNA
taaaatgaaacaaatatacaacacgaaggttatcaccagaaatatgccaaaacttaaatatgagaataagacagtctcaggggccacagag

SEQ ID NO: 5695 - DNA, 59 bp, Homo sapiens
  source 1..59: mol_type = genomic DNA
aaaatacagcgttatgaaaagaatgaacacacacacacacacacacacacagaaaatgt

SEQ ID NO: 5696 - DNA, 138 bp, Homo sapiens
  source 1..138: mol_type = genomic DNA
caaacaaataggtaccaaacaaataacaacataaacctgacaacacacttatttacaagagacatcccttatatgaaagggtacagaaaagtcgatggtaagatgatggggaaaggtataccaaccactagcagaagg

SEQ ID NO: 5697 - DNA, 93 bp, Homo sapiens
  source 1..93: mol_type = genomic DNA
tggaatcgaatggaatcaatatcaaacggaaaaaaacggaattatcgaatggaatcgaaaagaatcatcgaatgggcccgaatggaatcatct

SEQ ID NO: 5698 - DNA, 85 bp, Homo sapiens
  source 1..85: mol_type = genomic DNA
acaaatggaatcaacaacgaatggaatcgaatggaaacgccatcgaaaggaaacgaatggaattatcatgaaattgaaatggatg

SEQ ID NO: 5699 - DNA, 80 bp, Homo sapiens
  source 1..80: mol_type = genomic DNA
aatcaataaatgtaaaccagcatataaacagaaccaacgacaaaaaccacatgattatctcaatagatgcagaaaaggcc

SEQ ID NO: 5700 - DNA, 94 bp, Homo sapiens
  source 1..94: mol_type = genomic DNA
aaaataaacgcaaattaaaatcacaagataccaacacattcccacggctaagtacgaagaacaagggcgaatggtcagaattaagctcaaacct

SEQ ID NO: 5701 - DNA, 95 bp, Homo sapiens
  source 1..95: mol_type = genomic DNA
caacatcaaacggaatcaaacggaattatcgaatggaatcgaagagaatcatcgaatggactcgaatggaatcatctaatggaatggaatggaag

SEQ ID NO: 5702 - DNA, 60 bp, Homo sapiens
  source 1..60: mol_type = genomic DNA
acatcaaacggaaaaaaacggaattatcgaatggaatcgaagagaatcatcgaatggacc

SEQ ID NO: 5703 - DNA, 70 bp, Homo sapiens
  source 1..70: mol_type = genomic DNA
aatggactcgaatagaattgactggaatggaatggactcgaatggaatggaatggaatggaagggactcg

SEQ ID NO: 5704 - DNA, 138 bp, Homo sapiens
  source 1..138: mol_type = genomic DNA
aagaaagacagagaacaaacgtaattcaagatgactgattacatatccaagaacattagatggtcaaagactttaagaaggaatacattcaaaggcaaaacgtcacttactgattttggtggagtttgccacatggac

SEQ ID NO: 5705 - DNA, 83 bp, Homo sapiens
  source 1..83: mol_type = genomic DNA
gaatggaatcgaatggaatgaacatcaaacggaaaaaaacggaattatcgaatggaatcaaagagaatcatcgaatggacccg

SEQ ID NO: 5706 - DNA, 96 bp, Homo sapiens
  source 1..96: mol_type = genomic DNA
atggactcgaatgtaataatcattgaacggaatcgaatggaatcatcatcggatggaaacgaatggaatcatcatcgaatggaatcgaatgggatc

SEQ ID NO: 5707 - DNA, 66 bp, Homo sapiens
  source 1..66: mol_type = genomic DNA
gaaatggaatggaaaggaataaaatcaagtgaaattggatggaatggattggaatggattggaatg

SEQ ID NO: 5708 - DNA, 98 bp, Homo sapiens
  source 1..98: mol_type = genomic DNA
aaacggaaaaaaaacggaattatcgaatggaatcgaagagaatcatcgaacgaaccagaatggaatcatctaatggaatggaatggaataatccatgg

SEQ ID NO: 5709 - DNA, 78 bp, Homo sapiens
  source 1..78: mol_type = genomic DNA
attaacccgaatagaatggaatggaatggaatggaacggaacggaatggaatggaatggaatggaatggaatggatcg

SEQ ID NO: 5710 - DNA, 61 bp, Homo sapiens
  source 1..61: mol_type = genomic DNA
aacatcaaacggaaaaaaacggaattatcgtatggaatcgaagagaatcatcgaatggacc

SEQ ID NO: 5711 - DNA, 86 bp, Homo sapiens
  source 1..86: mol_type = genomic DNA
gaatagaattgaatcatcattgaatggaatcgagtagaatcattgaaatcgaatggaatcatcatcgaatggaattgggtggaatc

SEQ ID NO: 5712 - DNA, 80 bp, Homo sapiens
  source 1..80: mol_type = genomic DNA
caccgaatagaatcgaatggaacaatcatcgaatggactcaaatggaattatcctcaaatggaatcgaatggaattatcg

SEQ ID NO: 5713 - DNA, 68 bp, Homo sapiens
  source 1..68: mol_type = genomic DNA
aatgcaatcgaatagaatcatcgaatagactcgaatggaatcatcgaatggaatggaatggaacagtc

SEQ ID NO: 5714 - DNA, 85 bp, Homo sapiens
  source 1..85: mol_type = genomic DNA
aaatcatcatcgaatggaatcgaatggtatcattgaatggaatcgaatggaatcatcatcagatggaaatgaatggaatcgtcat

SEQ ID NO: 5715 - DNA, 95 bp, Homo sapiens
  source 1..95: mol_type = genomic DNA
gaatggaatcgaaaggaatagaatggaatggatcgttatggaaagacatcgaatggaatggaattgactcgaatggaatggactggaatggaacg

SEQ ID NO: 5716 - RNA, 778 nt, synthetic construct
  misc_feature 1..778: note = Description of Artificial Sequence: Synthetic Transcript Sequence
  source 1..778: mol_type = other RNA
gggaaataagagagaaaagaagagtaagaagaaatataagagccaccatggccggtcccgcgacccaaagccccatgaaacttatggccctgcagttgctgctttggcactcggccctctggacagtccaagaagcgactcctctcggacctgcctcatcgttgccgcagtcattccttttgaagtgtctggagcaggtgcgaaagattcagggcgatggagccgcactccaagagaagctctgcgcgacatacaaactttgccatcccgaggagctcgtactgctcgggcacagcttggggattccctgggctcctctctcgtcctgtccgtcgcaggctttgcagttggcagggtgcctttcccagctccactccggtttgttcttgtatcagggactgctgcaagcccttgagggaatctcgccagaattgggcccgacgctggacacgttgcagctcgacgtggcggatttcgcaacaaccatctggcagcagatggaggaactggggatggcacccgcgctgcagcccacgcagggggcaatgccggcctttgcgtccgcgtttcagcgcagggcgggtggagtcctcgtagcgagccaccttcaatcatttttggaagtctcgtaccgggtgctgagacatcttgcgcagccgtgataataggctggagcctcggtggccatgcttcttgccccttgggcctccccccagcccctcctccccttcctgcacccgtacccccgtggtctttgaataaagtctgagtgggcggc

SEQ ID NO: 5717 - RNA, 761 nt, synthetic construct
  misc_feature 1..761: note = Description of Artificial Sequence: Synthetic Transcript Sequence
  source 1..761: mol_type = other RNA
gggaaataagagagaaaagaagagtaagaagaaatataagagccaccatggccggtcccgcgacccaaagccccatgaaacttatggccctgcagttgctgctttggcactcggccctctggacagtccaagaagcgactcctctcggacctgcctcatcgttgccgcagtcattccttttgaagtgtctggagcaggtgcgaaagattcagggcgatggagccgcactccaagagaagctctgcgcgacatacaaactttgccatcccgaggagctcgtactgctcgggcacagcttggggattccctgggctcctctctcgtcctgtccgtcgcaggctttgcagttggcagggtgcctttcccagctccactccggtttgttcttgtatcagggactgctgcaagcccttgagggaatctcgccagaattgggcccgacgctggacacgttgcagctcgacgtggcggatttcgcaacaaccatctggcagcagatggaggaactggggatggcacccgcgctgcagcccacgcagggggcaatgccggcctttgcgtccgcgtttcagcgcagggcgggtggagtcctcgtagcgagccaccttcaatcatttttggaagtctcgtaccgggtgctgagacatcttgcgcagccgtgataataggctgccttctgcggggcttgccttctggccatgcccttcttctctcccttgcacctgtacctcttggtctttgaataaagcctgagtaggaag

SEQ ID NO: 5718 - RNA, 1549 nt, synthetic construct
  misc_feature 1..1549: note = Description of Artificial Sequence: Synthetic Transcript Sequence
  source 1..1549: mol_type = other RNA
gggaaataagagagaaaagaagagtaagaagaaatataagagccaccatgcagcgcgtcaacatgattatggccgaatcgccgggactcatcacaatctgcctcttgggttatctcttgtcggcagaatgtaccgtgttcttggatcacgaaaacgcgaacaaaattcttaatcgcccgaagcggtataactccgggaaacttgaggagtttgtgcagggcaatcttgaacgagagtgcatggaggagaaatgctcctttgaggaggcgagggaagtgtttgaaaacacagagcgaacaacggagttttggaagcaatacgtagatggggaccagtgtgagtcgaatccgtgcctcaatgggggatcatgtaaagatgacatcaatagctatgaatgctggtgcccgtttgggtttgaagggaagaactgtgagctggatgtgacgtgcaacatcaaaaacggacgctgtgagcagttttgtaagaactcggctgacaataaggtagtatgctcgtgcacagagggataccggctggcggagaaccaaaaatcgtgcgagcccgcagtcccgttcccttgtgggagggtgagcgtgtcacagactagcaagttgacgagagcggagactgtattccccgacgtggactacgtcaacagcaccgaagccgaaacaatcctcgataacatcacgcagagcactcagtccttcaatgactttacgagggtcgtaggtggtgaggacgcgaaacccggtcagttcccctggcaggtggtattgaacggaaaagtcgatgccttttgtggaggttccattgtcaacgagaagtggattgtcacagcggcacactgcgtagaaacaggagtgaaaatcacggtagtggcgggagagcataacattgaagagacagagcacacggaacaaaagcgaaatgtcatcagaatcattccacaccataactataacgcggcaatcaataagtacaatcacgacatcgcacttttggagcttgacgaacctttggtgcttaattcgtacgtcacccctatttgtattgccgacaaagagtatacaaacatcttcttgaaattcggctccgggtacgtatcgggctggggcagagtgttccataagggtagatccgcactggtgttgcaatacctcagggtgcccctcgtggatcgagccacttgtctgcggtccaccaaattcacaatctacaacaatatgttctgtgcgggattccatgaaggtgggagagatagctgccagggagactcagggggtccccacgtgacggaagtcgaggggacgtcatttctgacgggaattatctcatggggagaggaatgtgcgatgaaggggaaatatggcatctacactaaagtgtcacggtatgtcaattggatcaaggaaaagacgaaactcacgtgataataggctggagcctcggtggccatgcttcttgccccttgggcctccccccagcccctcctccccttcctgcacccgtacccccgtggtctttgaataaagtctgagtgggcggc

SEQ ID NO: 5719 - RNA, 1532 nt, synthetic construct
  misc_feature 1..1532: note = Description of Artificial Sequence: Synthetic Transcript Sequence
  source 1..1532: mol_type = other RNA
gggaaataagagagaaaagaagagtaagaagaaatataagagccaccatgcagcgcgtcaacatgattatggccgaatcgccgggactcatcacaatctgcctcttgggttatctcttgtcggcagaatgtaccgtgttcttggatcacgaaaacgcgaacaaaattcttaatcgcccgaagcggtataactccgggaaacttgaggagtttgtgcagggcaatcttgaacgagagtgcatggaggagaaatgctcctttgaggaggcgagggaagtgtttgaaaacacagagcgaacaacggagttttggaagcaatacgtagatggggaccagtgtgagtcgaatccgtgcctcaatgggggatcatgtaaagatgacatcaatagctatgaatgctggtgcccgtttgggtttgaagggaagaactgtgagctggatgtgacgtgcaacatcaaaaacggacgctgtgagcagttttgtaagaactcggctgacaataaggtagtatgctcgtgcacagagggataccggctggcggagaaccaaaaatcgtgcgagcccgcagtcccgttcccttgtgggagggtgagcgtgtcacagactagcaagttgacgagagcggagactgtattccccgacgtggactacgtcaacagcaccgaagccgaaacaatcctcgataacatcacgcagagcactcagtccttcaatgactttacgagggtcgtaggtggtgaggacgcgaaacccggtcagttcccctggcaggtggtattgaacggaaaagtcgatgccttttgtggaggttccattgtcaacgagaagtggattgtcacagcggcacactgcgtagaaacaggagtgaaaatcacggtagtggcgggagagcataacattgaagagacagagcacacggaacaaaagcgaaatgtcatcagaatcattccacaccataactataacgcggcaatcaataagtacaatcacgacatcgcacttttggagcttgacgaacctttggtgcttaattcgtacgtcacccctatttgtattgccgacaaagagtatacaaacatcttcttgaaattcggctccgggtacgtatcgggctggggcagagtgttccataagggtagatccgcactggtgttgcaatacctcagggtgcccctcgtggatcgagccacttgtctgcggtccaccaaattcacaatctacaacaatatgttctgtgcgggattccatgaaggtgggagagatagctgccagggagactcagggggtccccacgtgacggaagtcgaggggacgtcatttctgacgggaattatctcatggggagaggaatgtgcgatgaaggggaaatatggcatctacactaaagtgtcacggtatgtcaattggatcaaggaaaagacgaaactcacgtgataataggctgccttctgcggggcttgccttctggccatgcccttcttctctcccttgcacctgtacctcttggtctttgaataaagcctgagtaggaag

SEQ ID NO: 5720 - RNA, 778 nt, synthetic construct; identical to SEQ ID NO: 5716
  misc_feature 1..778: note = Description of Artificial Sequence: Synthetic Transcript Sequence
  source 1..778: mol_type = other RNA

SEQ ID NO: 5721 - DNA, 832 bp, synthetic construct
  misc_feature 1..832: note = Description of Artificial Sequence: Synthetic Transcript Sequence
  source 1..832: mol_type = other DNA
taatacgactcactatagggaaataagagagaaaagaagagtaagaagaaatataagagccaccatggccggtcccgcgacccaaagccccatgaaacttatggccctgcagttgctgctttggcactcggccctctggacagtccaagaagcgactcctctcggacctgcctcatcgttgccgcagtcattccttttgaagtgtctggagcaggtgcgaaagattcagggcgatggagccgcactccaagagaagctctgcgcgacatacaaactttgccatcccgaggagctcgtactgctcgggcacagcttggggattccctgggctcctctctcgtcctgtccgtcgcaggctttgcagttggcagggtgcctttcccagctccactccggtttgttcttgtatcagggactgctgcaagcccttgagggaatctcgccagaattgggcccgacgctggacacgttgcagctcgacgtggcggatttcgcaacaaccatctggcagcagatggaggaactggggatggcacccgcgctgcagcccacgcagggggcaatgccggcctttgcgtccgcgtttcagcgcagggcgggtggagtcctcgtagcgagccaccttcaatcatttttggaagtctcgtaccgggtgctgagacatcttgcgcagccgtgataataggattcgtcagtagggttgtaaaggtttttcttttcctgagaaaacaaccttttgttttctcaggttttgctttttggcctttccctagctttaaaaaaaaaaaagcaaaagtggtctttgaataaagtctgagtgggcggctctaga

SEQ ID NO: 5722 - RNA, 809 nt, synthetic construct
  misc_feature 1..809: note = Description of Artificial Sequence: Synthetic Transcript Sequence
  source 1..809: mol_type = other RNA
gggaaataagagagaaaagaagagtaagaagaaatataagagccaccatggccggtcccgcgacccaaagccccatgaaacttatggccctgcagttgctgctttggcactcggccctctggacagtccaagaagcgactcctctcggacctgcctcatcgttgccgcagtcattccttttgaagtgtctggagcaggtgcgaaagattcagggcgatggagccgcactccaagagaagctctgcgcgacatacaaactttgccatcccgaggagctcgtactgctcgggcacagcttggggattccctgggctcctctctcgtcctgtccgtcgcaggctttgcagttggcagggtgcctttcccagctccactccggtttgttcttgtatcagggactgctgcaagcccttgagggaatctcgccagaattgggcccgacgctggacacgttgcagctcgacgtggcggatttcgcaacaaccatctggcagcagatggaggaactggggatggcacccgcgctgcagcccacgcagggggcaatgccggcctttgcgtccgcgtttcagcgcagggcgggtggagtcctcgtagcgagccaccttcaatcatttttggaagtctcgtaccgggtgctgagacatcttgcgcagccgtgataataggattcgtcagtagggttgtaaaggtttttcttttcctgagaaaacaaccttttgttttctcaggttttgctttttggcctttccctagctttaaaaaaaaaaaagcaaaagtggtctttgaataaagtctgagtgggcggc

SEQ ID NO: 5723 - DNA, 928 bp, synthetic construct
  misc_feature 1..928: note = Description of Artificial Sequence: Synthetic Transcript Sequence
  source 1..928: mol_type = other DNA
taatacgactcactatagggaaataagagagaaaagaagagtaagaagaaatataagagccaccatggtatccaagggggaggaggacaacatggcgatcatcaaggagttcatgcgattcaaggtgcacatggaaggttcggtcaacggacacgaatttgaaatcgaaggagagggtgaaggaaggccctatgaagggacacagaccgcgaaactcaaggtcacgaaagggggaccacttcctttcgcctgggacattctttcgccccagtttatgtacgggtccaaagcatatgtgaagcatcccgccgatattcctgactatctgaaactcagctttcccgagggattcaagtgggagcgggtcatgaactttgaggacgggggtgtagtcaccgtaacccaagactcaagcctccaagacggcgagttcatctacaaggtcaaactgcgggggactaactttccgtcggatgggccggtgatgcagaagaaaacgatgggatgggaagcgtcatcggagaggatgtacccagaagatggtgcattgaagggggagatcaagcagagactgaagttgaaagatgggggacattatgatgccgaggtgaaaacgacatacaaagcgaaaaagccggtgcagcttcccggagcgtataatgtgaatatcaagttggatattacttcacacaatgaggactacacaattgtcgaacagtacgaacgcgctgagggtagacactcgacgggaggcatggacgagttgtacaaatgataataggattcgtcagtagggttgtaaaggtttttcttttcctgagaaaacaaccttttgttttctcaggttttgctttttggcctttccctagctttaaaaaaaaaaaagcaaaagtggtctttgaataaagtctgagtgggcggctctaga

SEQ ID NO: 5724 - RNA, 905 nt, synthetic construct
  misc_feature 1..905: note = Description of Artificial Sequence: Synthetic Transcript Sequence
  source 1..905: mol_type = other RNA
gggaaataagagagaaaagaagagtaagaagaaatataagagccaccatggtatccaagggggaggaggacaacatggcgatcatcaaggagttcatgcgattcaaggtgcacatggaaggttcggtcaacggacacgaatttgaaatcgaaggagagggtgaaggaaggccctatgaagggacacagaccgcgaaactcaaggtcacgaaagggggaccacttcctttcgcctgggacattctttcgccccagtttatgtacgggtccaaagcatatgtgaagcatcccgccgatattcctgactatctgaaactcagctttcccgagggattcaagtgggagcgggtcatgaactttgaggacgggggtgtagtcaccgtaacccaagactcaagcctccaagacggcgagttcatctacaaggtcaaactgcgggggactaactttccgtcggatgggccggtgatgcagaagaaaacgatgggatgggaagcgtcatcggagaggatgtacccagaagatggtgcattgaagggggagatcaagcagagactgaagttgaaagatgggggacattatgatgccgaggtgaaaacgacatacaaagcgaaaaagccggtgcagcttcccggagcgtataatgtgaatatcaagttggatattacttcacacaatgaggactacacaattgtcgaacagtacgaacgcgctgagggtagacactcgacgggaggcatggacgagttgtacaaatgataataggattcgtcagtagggttgtaaaggtttttcttttcctgagaaaacaaccttttgttttctcaggttttgctttttggcctttccctagctttaaaaaaaaaaaagcaaaagtggtctttgaataaagtctgagtgggcggc

SEQ ID NO: 5725 - DNA, 834 bp, synthetic construct
  misc_feature 1..834: note = Description of Artificial Sequence: Synthetic Transcript Sequence
  source 1..834: mol_type = other DNA
taatacgactcactatagggaaataagagagaaaagaagagtaagaagaaatataagagccaccatggccggtcccgcgacccaaagccccatgaaacttatggccctgcagttgctgctttggcactcggccctctggacagtccaagaagcgactcctctcggacctgcctcatcgttgccgcagtcattccttttgaagtgtctggagcaggtgcgaaagattcagggcgatggagccgcactccaagagaagctctgcgcgacatacaaactttgccatcccgaggagctcgtactgctcgggcacagcttggggattccctgggctcctctctcgtcctgtccgtcgcaggctttgcagttggcagggtgcctttcccagctccactccggtttgttcttgtatcagggactgctgcaagcccttgagggaatctcgccagaattgggcccgacgctggacacgttgcagctcgacgtggcggatttcgcaacaaccatctggcagcagatggaggaactggggatggcacccgcgctgcagcccacgcagggggcaatgccggcctttgcgtccgcgtttcagcgcagggcgggtggagtcctcgtagcgagccaccttcaatcatttttggaagtctcgtaccgggtgctgagacatcttgcgcagccgtgataatagtgctcttcagtagggtcatgaaggtttttcttttcctgagaaaacaacacgtattgttttctcaggttttgctttttggcctttttctagcttaaaaaaaaaaaaagcaaaagtggtctttgaataaagtctgagtgggcggctctaga

SEQ ID NO: 5726 - RNA, 811 nt, synthetic construct
  misc_feature 1..811: note = Description of Artificial Sequence: Synthetic Transcript Sequence
  source 1..811: mol_type = other RNA
gggaaataagagagaaaagaagagtaagaagaaatataagagccaccatggccggtcccgcgacccaaagccccatgaaacttatggccctgcagttgctgctttggcactcggccctctggacagtccaagaagcgactcctctcggacctgcctcatcgttgccgcagtcattccttttgaagtgtctggagcaggtgcgaaagattcagggcgatggagccgcactccaagagaagctctgcgcgacatacaaactttgccatcccgaggagctcgtactgctcgggcacagcttggggattccctgggctcctctctcgtcctgtccgtcgcaggctttgcagttggcagggtgcctttcccagctccactccggtttgttcttgtatcagggactgctgcaagcccttgagggaatctcgccagaattgggcccgacgctggacacgttgcagctcgacgtggcggatttcgcaacaaccatctggcagcagatggaggaactggggatggcacccgcgctgcagcccacgcagggggcaatgccggcctttgcgtccgcgtttcagcgcagggcgggtggagtcctcgtagcgagccaccttcaatcatttttggaagtctcgtaccgggtgctgagacatcttgcgcagccgtgataatagtgctcttcagtagggtcatgaaggtttttcttttcctgagaaaacaacacgtattgttttctcaggttttgctttttggcctttttctagcttaaaaaaaaaaaaagcaaaagtggtctttgaataaagtctgagtgggcggc

SEQ ID NO: 5727 - DNA, 930 bp, synthetic construct
  misc_feature 1..930: note = Description of Artificial Sequence: Synthetic Transcript Sequence
  source 1..930: mol_type = other DNA
taatacgactcactatagggaaataagagagaaaagaagagtaagaagaaatataagagccaccatggtatccaagggggaggaggacaacatggcgatcatcaaggagttcatgcgattcaaggtgcacatggaaggttcggtcaacggacacgaatttgaaatcgaaggagagggtgaaggaaggccctatgaagggacacagaccgcgaaactcaaggtcacgaaagggggaccacttcctttcgcctgggacattctttcgccccagtttatgtacgggtccaaagcatatgtgaagcatcccgccgatattcctgactatctgaaactcagctttcccgagggattcaagtgggagcgggtcatgaactttgaggacgggggtgtagtcaccgtaacccaagactcaagcctccaagacggcgagttcatctacaaggtcaaactgcgggggactaactttccgtcggatgggccggtgatgcagaagaaaacgatgggatgggaagcgtcatcggagaggatgtacccagaagatggtgcattgaagggggagatcaagcagagactgaagttgaaagatgggggacattatgatgccgaggtgaaaacgacatacaaagcgaaaaagccggtgcagcttcccggagcgtataatgtgaatatcaagttggatattacttcacacaatgaggactacacaattgtcgaacagtacgaacgcgctgagggtagacactcgacgggaggcatggacgagttgtacaaatgataatagtgctcttcagtagggtcatgaaggtttttcttttcctgagaaaacaacacgtattgttttctcaggttttgctttttggcctttttctagcttaaaaaaaaaaaaagcaaaagtggtctttgaataaagtctgagtgggcggctctaga

SEQ ID NO: 5728 - RNA, 907 nt, synthetic construct
  misc_feature 1..907: note = Description of Artificial Sequence: Synthetic Transcript Sequence
  source 1..907: mol_type = other RNA
gggaaataagagagaaaagaagagtaagaagaaatataagagccaccatggtatccaagggggaggaggacaacatggcgatcatcaaggagttcatgcgattcaaggtgcacatggaaggttcggtcaacggacacgaatttgaaatcgaaggagagggtgaaggaaggccctatgaagggacacagaccgcgaaactcaaggtcacgaaagggggaccacttcctttcgcctgggacattctttcgccccagtttatgtacgggtccaaagcatatgtgaagcatcccgccgatattcctgactatctgaaactcagctttcccgagggattcaagtgggagcgggtcatgaactttgaggacgggggtgtagtcaccgtaacccaagactcaagcctccaagacggcgagttcatctacaaggtcaaactgcgggggactaactttccgtcggatgggccggtgatgcagaagaaaacgatgggatgggaagcgtcatcggagaggatgtacccagaagatggtgcattgaagggggagatcaagcagagactgaagttgaaagatgggggacattatgatgccgaggtgaaaacgacatacaaagcgaaaaagccggtgcagcttcccggagcgtataatgtgaatatcaagttggatattacttcacacaatgaggactacacaattgtcgaacagtacgaacgcgctgagggtagacactcgacgggaggcatggacgagttgtacaaatgataatagtgctcttcagtagggtcatgaaggtttttcttttcctgagaaaacaacacgtattgttttctcaggttttgctttttggcctttttctagcttaaaaaaaaaaaaagcaaaagtggtctttgaataaagtctgagtgggcggc

SEQ ID NO: 5729 - DNA, 47 bp, synthetic construct; identical to SEQ ID NO: 6
  misc_feature 1..47: note = Description of Artificial Sequence: Synthetic UTR
  source 1..47: mol_type = other DNA

SEQ ID NO: 5730 - DNA, 145 bp, synthetic construct; identical to SEQ ID NO: 7
  misc_feature 1..145: note = Description of Artificial Sequence: Synthetic UTR
  source 1..145: mol_type = other DNA

SEQ ID NO: 5731 - RNA, 42 nt, synthetic construct; identical to SEQ ID NO: 8
  misc_feature 1..42: note = Description of Artificial Sequence: Synthetic UTR
  source 1..42: mol_type = other RNA

SEQ ID NO: 5732 - DNA, 47 bp, synthetic construct
  misc_feature 1..47: note = Description of Artificial Sequence: Synthetic UTR
  source 1..47: mol_type = other DNA
gggaattaacagagaaaagaagagtaagaagaaatataagagccacc

SEQ ID NO: 5733 - DNA, 47 bp, synthetic construct
  misc_feature 1..47: note = Description of Artificial Sequence: Synthetic UTR
  source 1..47: mol_type = other DNA
gggaaattagacagaaaagaagagtaagaagaaatataagagccacc

SEQ ID NO: 5734 - DNA, 47 bp, synthetic construct
  misc_feature 1..47: note = Description of Artificial Sequence: Synthetic UTR
  source 1..47: mol_type = other DNA
gggaaataagagagtaaagaacagtaagaagaaatataagagccacc

SEQ ID NO: 5735 - DNA, 47 bp, synthetic construct
  misc_feature 1..47: note = Description of Artificial Sequence: Synthetic UTR
  source 1..47: mol_type = other DNA
gggaaaaaagagagaaaagaagactaagaagaaatataagagccacc

SEQ ID NO: 5736 - DNA, 47 bp, synthetic construct
  misc_feature 1..47: note = Description of Artificial Sequence: Synthetic UTR
  source 1..47: mol_type = other DNA
gggaaataagagagaaaagaagagtaagaagatatataagagccacc

SEQ ID NO: 5737 - DNA, 47 bp, synthetic construct
  misc_feature 1..47: note = Description of Artificial Sequence: Synthetic UTR
  source 1..47: mol_type = other DNA
gggaaataagagacaaaacaagagtaagaagaaatataagagccacc

SEQ ID NO: 5738 - DNA, 47 bp, synthetic construct
  misc_feature 1..47: note = Description of Artificial Sequence: Synthetic UTR
  source 1..47: mol_type = other DNA
gggaaattagagagtaaagaacagtaagtagaattaaaagagccacc

SEQ ID NO: 5739 - DNA, 47 bp, synthetic construct
  misc_feature 1..47: note = Description of Artificial Sequence: Synthetic UTR
  source 1..47: mol_type = other DNA
gggaaataagagagaatagaagagtaagaagaaatataagagccacc

SEQ ID NO: 5740 - DNA, 47 bp, synthetic construct
  misc_feature 1..47: note = Description of Artificial Sequence: Synthetic UTR
  source 1..47: mol_type = other DNA
gggaaataagagagaaaagaagagtaagaagaaaattaagagccacc

SEQ ID NO: 5741 - DNA, 47 bp, synthetic construct
  misc_feature 1..47: note = Description of Artificial Sequence: Synthetic UTR
  source 1..47: mol_type = other DNA
gggaaataagagagaaaagaagagtaagaagaaatttaagagccacc

SEQ ID NO: 5742 - DNA, 47 bp, synthetic construct
  misc_feature 1..47: note = Description of Artificial Sequence: Synthetic UTR
  source 1..47: mol_type = other DNA
gggaaataagagagaaaagaagagtaagaagaaatataagagcctcc

SEQ ID NO: 5743 - DNA, 41 bp, synthetic construct
  misc_feature 1..41: note = Description of Artificial Sequence: Synthetic UTR
  source 1..41: mol_type = other DNA
gggaaataagagagaaaagaagagtaagaagaaatatatga

SEQ ID NO: 5744 - DNA, 38 bp, synthetic construct
  misc_feature 1..38: note = Description of Artificial Sequence: Synthetic UTR
  source 1..38: mol_type = other DNA
gggaaataagagagaaaagaagagtaagaagaaatata

SEQ ID NO: 5745 - RNA, 758 nt, synthetic construct; identical to SEQ ID NO: 4258
  misc_feature 1..758: note = Description of Artificial Sequence: Synthetic Transcript Sequence
  source 1..758: mol_type = other RNA

SEQ ID NO: 5746 - RNA, 1536 nt, synthetic construct
  misc_feature 1..1536: note = Description of Artificial Sequence: Synthetic Transcript Sequence
  source 1..1536: mol_type = other RNA
gggaaataagagagaaaagaagagtaagaagaaatataagagccaccaatgcagcgcgtcaacatgattatggccgaatcgccgggactcatcacaatctgcctcttgggttatctcttgtcggcagaatgtaccgtgttcttggatcacgaaaacgcgaacaaaattcttaatcgcccgaagcggtataactccgggaaacttgaggagtttgtgcagggcaatcttgaacgagagtgcatggaggagaaatgctcctttgaggaggcgagggaagtgtttgaaaacacagagcgaacaacggagttttggaagcaatacgtagatggggaccagtgtgagtcgaatccgtgcctcaatgggggatcatgtaaagatgacatcaatagctatgaatgctggtgcccgtttgggtttgaagggaagaactgtgagctggatgtgacgtgcaacatcaaaaacggacgctgtgagcagttttgtaagaactcggctgacaataaggtagtatgctcgtgcacagagggataccggctggcggagaaccaaaaatcgtgcgagcccgcagtcccgttcccttgtgggagggtgagcgtgtcacagactagcaagttgacgagagcggagactgtattccccgacgtggactacgtcaacagcaccgaagccgaaacaatcctcgataacatcacgcagagcactcagtccttcaatgactttacgagggtcgtaggtggtgaggacgcgaaacccggtcagttcccctggcaggtggtattgaacggaaaagtcgatgccttttgtggaggttccattgtcaacgagaagtggattgtcacagcggcacactgcgtagaaacaggagtgaaaatcacggtagtggcgggagagcataacattgaagagacagagcacacggaacaaaagcgaaatgtcatcagaatcattccacaccataactataacgcggcaatcaataagtacaatcacgacatcgcacttttggagcttgacgaacctttggtgcttaattcgtacgtcacccctatttgtattgccgacaaagagtatacaaacatcttcttgaaattcggctccgggtacgtatcgggctggggcagagtgttccataagggtagatccgcactggtgttgcaatacctcagggtgcccctcgtggatcgagccacttgtctgcggtccaccaaattcacaatctacaacaatatgttctgtgcgggattccatgaaggtgggagagatagctgccagggagactcagggggtccccacgtgacggaagtcgaggggacgtcatttctgacgggaattatctcatggggagaggaatgtgcgatgaaggggaaatatggcatctacactaaagtgtcacggtatgtcaattggatcaaggaaaagacgaaactcacgtgatcagccagcgctgccttctgcggggcttgccttctggccatgcccttcttctctcccttgcacctgtacctcttggtctttgaataaagcctgagtaggaag

SEQ ID NO: 5747 - RNA, 725 nt, synthetic construct
  misc_feature 1..725: note = Description of Artificial Sequence: Synthetic Transcript Sequence
  source 1..725: mol_type = other RNA
gggaaataagagagaaaagaagagtaagaagaaatataagagccaccatgggagtgcacgagtgtcccgcgtggttgtggttgctgctgtcgctcttgagcctcccactgggactgcctgtgctgggggcaccacccagattgatctgcgactcacgggtacttgagaggtaccttcttgaagccaaagaagccgaaaacatcacaaccggatgcgccgagcactgctccctcaatgagaacattactgtaccggatacaaaggtcaatttctatgcatggaagagaatggaagtaggacagcaggccgtcgaagtgtggcaggggctcgcgcttttgtcggaggcggtgttgcggggtcaggccctcctcgtcaactcatcacagccgtgggagcccctccaacttcatgtcgataaagcggtgtcggggctccgcagcttgacgacgttgcttcgggctctgggcgcacaaaaggaggctatttcgccgcctgacgcggcctccgcggcacccctccgaacgatcaccgcggacacgtttaggaagctttttagagtgtacagcaatttcctccgcggaaagctgaaattgtatactggtgaagcgtgtaggacaggggatcgctgataagctgccttctgcggggcttgccttctggccatgcccttcttctctcccttgcacctgtacctcttggtctttgaataaagcctgagtaggaag

SEQ ID NO: 5748 - RNA, 854 nt, synthetic construct
  misc_feature 1..854: note = Description of Artificial Sequence: Synthetic Transcript Sequence
  source 1..854: mol_type = other RNA
gggaaataagagagaaaagaagagtaagaagaaatataagagccaccatggtatccaagggggaggaggacaacatggcgatcatcaaggagttcatgcgattcaaggtgcacatggaaggttcggtcaacggacacgaatttgaaatcgaaggagagggtgaaggaaggccctatgaagggacacagaccgcgaaactcaaggtcacgaaagggggaccacttcctttcgcctgggacattctttcgccccagtttatgtacgggtccaaagcatatgtgaagcatcccgccgatattcctgactatctgaaactcagctttcccgagggattcaagtgggagcgggtcatgaactttgaggacgggggtgtagtcaccgtaacccaagactcaagcctccaagacggcgagttcatctacaaggtcaaactgcgggggactaactttccgtcggatgggccggtgatgcagaagaaaacgatgggatgggaagcgtcatcggagaggatgtacccagaagatggtgcattgaagggggagatcaagcagagactgaagttgaaagatgggggacattatgatgccgaggtgaaaacgacatacaaagcgaaaaagccggtgcagcttcccggagcgtataatgtgaatatcaagttggatattacttcacacaatgaggactacacaattgtcgaacagtacgaacgcgctgagggtagacactcgacgggaggcatggacgagttgtacaaatgataagctgccttctgcggggcttgccttctggccatgcccttcttctctcccttgcacctgtacctcttggtctttgaataaagcctgagtaggaag

SEQ ID NO: 5749 - RNA, 758 nt, synthetic construct; identical to SEQ ID NO: 4266
  misc_feature 1..758: note = Description of Artificial Sequence: Synthetic Transcript Sequence
  source 1..758: mol_type = other RNA

SEQ ID NO: 5750 - RNA, 780 nt, synthetic construct
  misc_feature 1..780: note = Description of Artificial Sequence: Synthetic Transcript Sequence
  source 1..780: mol_type = other RNA
gggaaataagagagaaaagaagagtaagaagaaatataagagccaccatggccggtcccgcgacccaaagccccatgaaacttatggccctgcagttgctgctttggcactcggccctctggacagtccaagaagcgactcctctcggacctgcctcatcgttgccgcagtcattccttttgaagtgtctggagcaggtgcgaaagattcagggcgatggagccgcactccaagagaagctctgcgcgacatacaaactttgccatcccgaggagctcgtactgctcgggcacagcttggggattccctgggctcctctctcgtcctgtccgtcgcaggctttgcagttggcagggtgcctttcccagctccactccggtttgttcttgtatcagggactgctgcaagcccttgagggaatctcgccagaattgggcccgacgctggacacgttgcagctcgacgtggcggatttcgcaacaaccatctggcagcagatggaggaactggggatggcacccgcgctgcagcccacgcagggggcaatgccggcctttgcgtccgcgtttcagcgcagggcgggtggagtcctcgtagcgagccaccttcaatcatttttggaagtctcgtaccgggtgctgagacatcttgcgcagccgtgataagctgccttctgcggggcttgccttctggccatgcccttcttctctcccttgcacctgtacctcttccataaagtaggaacactacatggtctttgaataaagcctgagtaggaag

SEQ ID NO: 5751 - RNA, 765 nt, synthetic construct
  misc_feature 1..765: note = Description of Artificial Sequence: Synthetic Transcript Sequence
  source 1..765: mol_type = other RNA
gggaaataagagagaaaagaagagtaagaagaaatataagagccaccatggccggtcccgcgacccaaagccccatgaaacttatggccctgcagttgctgctttggcactcggccctctggacagtccaagaagcgactcctctcggacctgcctcatcgttgccgcagtcattccttttgaagtgtctggagcaggtgcgaaagattcagggcgatggagccgcactccaagagaagctctgcgcgacatacaaactttgccatcccgaggagctcgtactgctcgggcacagcttggggattccctgggctcctctctcgtcctgtccgtcgcaggctttgcagttggcagggtgcctttcccagctccactccggtttgttcttgtatcagggactgctgcaagcccttgagggaatctcgccagaattgggcccgacgctggacacgttgcagctcgacgtggcggatttcgcaacaaccatctggcagcagatggaggaactggggatggcacccgcgctgcagcccacgcagggggcaatgccggcctttgcgtccgcgtttcagcgcagggcgggtggagtcctcgtagcgagccaccttcaatcatttttggaagtctcgtaccgggtgctgagacatcttgcgcagccgtgataagctgccttctgcggggcttgccttctggccatgcccttcttctctcccttgcacctgtacctctacactactggtctttgaataaagcctgagtaggaag

SEQ ID NO: 5752 - RNA, 773 nt, synthetic construct
  misc_feature 1..773: note = Description of Artificial Sequence: Synthetic Transcript Sequence
  source 1..773: mol_type = other RNA
gggaaataagagagaaaagaagagtaagaagaaatataagagccaccatggccggtcccgcgacccaaagccccatgaaacttatggccctgcagttgctgctttggcactcggccctctggacagtccaagaagcgactcctctcggacctgcctcatcgttgccgcagtcattccttttgaagtgtctggagcaggtgcgaaagattcagggcgatggagccgcactccaagagaagctctgcgcgacatacaaactttgccatcccgaggagctcgtactgctcgggcacagcttggggattccctgggctcctctctcgtcctgtccgtcgcaggctttgcagttggcagggtgcctttcccagctccactccggtttgttcttgtatcagggactgctgcaagcccttgagggaatctcgccagaattgggcccgacgctggacacgttgcagctcgacgtggcggatttcgcaacaaccatctggcagcagatggaggaactggggatggcacccgcgctgcagcccacgcagggggcaatgccggcctttgcgtccgcgtttcagcgcagggcgggtggagtcctcgtagcgagccaccttcaatcatttttggaagtctcgtaccgggtgctgagacatcttgcgcagccgtgataagctgccttctgcggggcttgccttctggccatgcccttcttctctcccttgcacctgtacctcttccataaagtaggaatggtctttgaataaagcctgagtaggaag

SEQ ID NO: 5753 - RNA, 1799 nt, synthetic construct
  misc_feature 1..1799: note = Description of Artificial Sequence: Synthetic Transcript Sequence
  source 1..1799: mol_type = other RNA
gggaaataagagagaaaagaagagtaagaagaaatataagagccaccatggaagatgcgaagaacatcaagaagggacctgccccgttttaccctttggaggacggtacagcaggagaacagctccacaaggcgatgaaacgctacgccctggtccccggaacgattgcgtttaccgatgcacatattgaggtagacatcacatacgcagaatacttcgaaatgtcggtgaggctggcggaagcgatgaagagatatggtcttaacactaatcaccgcatcgtggtgtgttcggagaactcattgcagtttttcatgccggtccttggagcacttttcatcggggtcgcagtcgcgccagcgaacgacatctacaatgagcgggaactcttgaatagcatgggaatctcccagccgacggtcgtgtttgtctccaaaaaggggctgcagaaaatcctcaacgtgcagaagaagctccccattattcaaaagatcatcattatggatagcaagacagattaccaagggttccagtcgatgtatacctttgtgacatcgcatttgccgccagggtttaacgagtatgacttcgtccccgagtcatttgacagagataaaaccatcgcgctgattatgaattcctcgggtagcaccggtttgccaaagggggtggcgttgccccaccgcactgcttgtgtgcggttctcgcacgctagggatcctatctttggtaatcagatcattcccgacacagcaatcctgtccgtggtaccttttcatcacggttttggcatgttcacgactctcggctatttgatttgcggtttcagggtcgtacttatgtatcggttcgaggaagaactgtttttgagatccttgcaagattacaagatccagtcggccctccttgtgccaacgcttttctcattctttgcgaaatcgacacttattgataagtatgacctttccaatctgcatgagattgcctcagggggagcgccgcttagcaaggaagtcggggaggcagtggccaagcgcttccaccttcccggaattcggcagggatacgggctcacggagacaacatccgcgatccttatcacgcccgagggtgacgataagccgggagccgtcggaaaagtggtccccttctttgaagccaaggtcgtagacctcgacacgggaaaaaccctcggagtgaaccagaggggcgagctctgcgtgagagggccgatgatcatgtcaggttacgtgaataaccctgaagcgacgaatgcgctgatcgacaaggatgggtggttgcattcgggagacattgcctattgggatgaggatgagcacttctttatcgtagatcgacttaagagcttgatcaaatacaaaggctatcaggtagcgcctgccgagctcgagtcaatcctgctccagcaccccaacattttcgacgccggagtggccgggttgcccgatgacgacgcgggtgagctgccagcggccgtggtagtcctcgaacatgggaaaacaatgaccgaaaaggagatcgtggactacgtagcatcacaagtgacgactgcgaagaaactgaggggaggggtagtctttgtggacgaggtcccgaaaggcttgactgggaagcttgacgctcgcaaaatccgggaaatcctgattaaggcaaagaaaggcgggaaaatcgctgtctgataataggctgccttctgcggggcttgccttctggccatgcccttcttctctcccttgcacctgtacctcttggtctttgaataaagcctgagtaggaag

SEQ ID NO: 5754 - RNA, 1821 nt, synthetic construct
  misc_feature 1..1821: note = Description of Artificial Sequence: Synthetic Transcript Sequence
  source 1..1821: mol_type = other RNA
gggaaataagagagaaaagaagagtaagaagaaatataagagccaccatggaagatgcgaagaacatcaagaagggacctgccccgttttaccctttggaggacggtacagcaggagaacagctccacaaggcgatgaaacgctacgccctggtccccggaacgattgcgtttaccgatgcacatattgaggtagacatcacatacgcagaatacttcgaaatgtcggtgaggctggcggaagcgatgaagagatatggtcttaacactaatcaccgcatcgtggtgtgttcggagaactcattgcagtttttcatgccggtccttggagcacttttcatcggggtcgcagtcgcgccagcgaacgacatctacaatgagcgggaactcttgaatagcatgggaatctcccagccgacggtcgtgtttgtctccaaaaaggggctgcagaaaatcctcaacgtgcagaagaagctccccattattcaaaagatcatcattatggatagcaagacagattaccaagggttccagtcgatgtatacctttgtgacatcgcatttgccgccagggtttaacgagtatgacttcgtccccgagtcatttgacagagataaaaccatcgcgctgattatgaattcctcgggtagcaccggtttgccaaagggggtggcgttgccccaccgcactgcttgtgtgcggttctcgcacgctagggatcctatctttggtaatcagatcattcccgacacagcaatcctgtccgtggtaccttttcatcacggttttggcatgttcacgactctcggctatttgatttgcggtttcagggtcgtacttatgtatcggttcgaggaagaactgtttttgagatccttgcaagattacaagatccagtcggccctccttgtgccaacgcttttctcattctttgcgaaatcgacacttattgataagtatgacctttccaatctgcatgagattgcctcagggggagcgccgcttagcaaggaagtcggggaggcagtggccaagcgcttccaccttcccggaattcggcagggatacgggctcacggagacaacatccgcgatccttatcacgcccgagggtgacgataagccgggagccgtcggaaaagtggtccccttctttgaagccaaggtcgtagacctcgacacgggaaaaaccctcggagtgaaccagaggggcgagctctgcgtgagagggccgatgatcatgtcaggttacgtgaataaccctgaagcgacgaatgcgctgatcgacaaggatgggtggttgcattcgggagacattgcctattgggatgaggatgagcacttctttatcgtagatcgacttaagagcttgatcaaatacaaaggctatcaggtagcgcctgccgagctcgagtcaatcctgctccagcaccccaacattttcgacgccggagtggccgggttgcccgatgacgacgcgggtgagctgccagcggccgtggtagtcctcgaacatgggaaaacaatgaccgaaaaggagatcgtggactacgtagcatcacaagtgacgactgcgaagaaactgaggggaggggtagtctttgtggacgaggtcccgaaaggcttgactgggaagcttgacgctcgcaaaatccgggaaatcctgattaaggcaaagaaaggcgggaaaatcgctgtctgataataggctgccttctgcggggcttgccttctggccatgcccttcttctctcccttgcacctgtacctctcaaacaccattgtcacactccatggtctttgaataaagcctgagtaggaag

SEQ ID NO: 5755 - RNA, 778 nt, synthetic construct
  misc_feature 1..778: note = Description of Artificial Sequence: Synthetic Transcript Sequence
  source 1..778: mol_type = other RNA
gggaaataagagagaaaagaagagtaagaagaaatataagagcctccatggccggtcccgcgacccaaagccccatgaaacttatggccctgcagttgctgctttggcactcggccctctggacagtccaagaagcgactcctctcggacctgcctcatcgttgccgcagtcattccttttgaagtgtctggagcaggtgcgaaagattcagggcgatggagccgcactccaagagaagctctgcgcgacatacaaactttgccatcccgaggagctcgtactgctcgggcacagcttggggattccctgggctcctctctcgtcctgtccgtcgcaggctttgcagttggcagggtgcctttcccagctccactccggtttgttcttgtatcagggactgctgcaagcccttgagggaatctcgccagaattgggcccgacgctggacacgttgcagctcgacgtggcggatttcgcaacaaccatctggcagcagatggaggaactggggatggcacccgcgctgcagcccacgcagggggcaatgccggcctttgcgtccgcgtttcagcgcagggcgggtggagtcctcgtagcgagccaccttcaatcatttttggaagtctcgtaccgggtgctgagacatcttgcgcagccgtgataataggctggagcctcggtggccatgcttcttgccccttgggcctccccccagcccctcctccccttcctgcacccgtacccccgtggtctttgaataaagtctgagtgggcggc

SEQ ID NO: 5756 - RNA, 778 nt, synthetic construct
  misc_feature 1..778: note = Description of Artificial Sequence: Synthetic Transcript Sequence
  source 1..778: mol_type = other RNA
gggaaataagagagaaaagaagagtaagaagaaatatatgagccaccatggccggtcccgcgacccaaagccccatgaaacttatggccctgcagttgctgctttggcactcggccctctggacagtccaagaagcgactcctctcggacctgcctcatcgttgccgcagtcattccttttgaagtgtctggagcaggtgcgaaagattcagggcgatggagccgcactccaagagaagctctgcgcgacatacaaactttgccatcccgaggagctcgtactgctcgggcacagcttggggattccctgggctcctctctcgtcctgtccgtcgcaggctttgcagttggcagggtgcctttcccagctccactccggtttgttcttgtatcagggactgctgcaagcccttgagggaatctcgccagaattgggcccgacgctggacacgttgcagctcgacgtggcggatttcgcaacaaccatctggcagcagatggaggaactggggatggcacccgcgctgcagcccacgcagggggcaatgccggcctttgcgtccgcgtttcagcgcagggcgggtggagtcctcgtagcgagccaccttcaatcatttttggaagtctcgtaccgggtgctgagacatcttgcgcagccgtgataataggctggagcctcggtggccatgcttcttgccccttgggcctccccccagcccctcctccccttcctgcacccgtacccccgtggtctttgaataaagtctgagtgggcggc

SEQ ID NO: 5757 - RNA, 769 nt, synthetic construct
  misc_feature 1..769: note = Description of Artificial Sequence: Synthetic Transcript Sequence
  source 1..769: mol_type = other RNA
gggaaataagagagaaaagaagagtaagaagaaatataatggccggtcccgcgacccaaagccccatgaaacttatggccctgcagttgctgctttggcactcggccctctggacagtccaagaagcgactcctctcggacctgcctcatcgttgccgcagtcattccttttgaagtgtctggagcaggtgcgaaagattcagggcgatggagccgcactccaagagaagctctgcgcgacatacaaactttgccatcccgaggagctcgtactgctcgggcacagcttggggattccctgggctcctctctcgtcctgtccgtcgcaggctttgcagttggcagggtgcctttcccagctccactccggtttgttcttgtatcagggactgctgcaagcccttgagggaatctcgccagaattgggcccgacgctggacacgttgcagctcgacgtggcggatttcgcaacaaccatctggcagcagatggaggaactggggatggcacccgcgctgcagcccacgcagggggcaatgccggcctttgcgtccgcgtttcagcgcagggcgggtggagtcctcgtagcgagccaccttcaatcatttttggaagtctcgtaccgggtgctgagacatcttgcgcagccgtgataataggctggagcctcggtggccatgcttcttgccccttgggcctccccccagcccctcctccccttcctgcacccgtacccccgtggtctttgaataaagtctgagtgggcggc

SEQ ID NO: 5758 - RNA, 893 nt, synthetic construct
  misc_feature 1..893: note = Description of Artificial Sequence: Synthetic Transcript Sequence
  source 1..893: mol_type = other RNA
gggaaattctgacatccggcggaattctgacatccggcggaattctgacatccggcggaattctgacatccggcggaattctgacatccggcggaagactcacaaccccagaaacagacattaagagagaaaagaagagtaagaagaaatataagagccaccatggccggtcccgcgacccaaagccccatgaaacttatggccctgcagttgctgctttggcactcggccctctggacagtccaagaagcgactcctctcggacctgcctcatcgttgccgcagtcattccttttgaagtgtctggagcaggtgcgaaagattcagggcgatggagccgcactccaagagaagctctgcgcgacatacaaactttgccatcccgaggagctcgtactgctcgggcacagcttggggattccctgggctcctctctcgtcctgtccgtcgcaggctttgcagttggcagggtgcctttcccagctccactccggtttgttcttgtatcagggactgctgcaagcccttgagggaatctcgccagaattgggcccgacgctggacacgttgcagctcgacgtggcggatttcgcaacaaccatctggcagcagatggaggaactggggatggcacccgcgctgcagcccacgcagggggcaatgccggcctttgcgtccgcgtttcagcgcagggcgggtggagtcctcgtagcgagccaccttcaatcatttttggaagtctcgtaccgggtgctgagacatcttgcgcagccgtgataataggctggagcctcggtggccatgcttcttgccccttgggcctccccccagcccctcctccccttcctgcacccgtacccccgtggtctttgaataaagtctgagtgggcggc

1. A synthetic isolated terminally optimized mRNA comprising
(a) a first region of linked nucleosides encoding a polypeptide of interest;
(b) a first terminal region located 5′ relative to said first region comprising at least one translation enhancer element (TEE);
(c) a second terminal region located 3′ relative to said first region; and
(d) a 3′ tailing region of linked nucleosides.

2. The synthetic isolated terminally optimized mRNA of claim 1, wherein any of the regions (a)-(d) comprise at least one modified nucleoside.

3. The synthetic isolated terminally optimized mRNA of claim 2, wherein the at least one modified nucleoside is selected from the group consisting of pseudouridine analogs.

4. The synthetic isolated terminally optimized mRNA of claim 3, wherein the pseudouridine analog is 1-methylpseudouridine.

5. The synthetic isolated terminally optimized mRNA of claim 4, further comprising the modified nucleoside 5-methylcytidine.

6. The synthetic isolated terminally optimized mRNA of claim 1, wherein at least one region of the synthetic isolated terminally optimized mRNA is codon optimized.

7. The synthetic isolated terminally optimized mRNA of claim 6, wherein the first region of linked nucleosides is codon optimized.

8. The synthetic isolated terminally optimized mRNA of claim 1, wherein the first terminal region comprises a 5′ untranslated region (UTR).

9. The synthetic isolated terminally optimized mRNA of claim 8, wherein the 5′ UTR is the native 5′ UTR of the encoded polypeptide of interest.

10. The synthetic isolated terminally optimized mRNA of claim 9, wherein the 5′ UTR comprises a translation initiation sequence selected from the group consisting of Kozak sequence and an internal ribosome entry site (IRES).

11. The synthetic isolated terminally optimized mRNA of claim 9, wherein the 5′ UTR is a structured UTR.

12. The synthetic isolated terminally optimized mRNA of claim 1, wherein the first terminal region comprises at least one 5′ cap structure.

13. The synthetic isolated terminally optimized mRNA of claim 12, wherein the at least one 5′ cap structure is selected from the group consisting of Cap0, Cap1, ARCA, inosine, N1-methyl-guanosine, 2′fluoro-guanosine, 7-deaza-guanosine, 8-oxo-guanosine, 2-amino-guanosine, LNA-guanosine, 2-azido-guanosine, Cap2, Cap4, and CAP-003-CAP-225.

14. The synthetic isolated terminally optimized mRNA of claim 1, wherein the TEE is selected from the group of TEE-001-TEE-705.

15. The synthetic isolated terminally optimized mRNA of claim 1, wherein the second terminal region comprises at least one microRNA binding site or seed of said microRNA binding site.

16. The synthetic isolated terminally optimized mRNA of claim 15, wherein the at least one microRNA binding site or seed of said microRNA binding site is for an immune cell specific microRNA.

17. The synthetic isolated terminally optimized mRNA of claim 16, wherein the immune cell specific microRNA is selected from the group consisting of mir-122, miR-142-3p, miR-142-5p, miR-146a and miR-146b.

18. The synthetic isolated terminally optimized mRNA of claim 1, wherein the 3′ tailing region of linked nucleosides further comprises a chain terminating nucleoside.

19. The synthetic isolated terminally optimized mRNA of claim 18, wherein the chain terminating nucleoside is selected from the group consisting of 3′-deoxyadenosine (cordycepin), 3′-deoxyuridine, 3′-deoxycytosine, 3′-deoxyguanosine, 3′-deoxythymine, 2′,3′-dideoxynucleosides, 2′,3′-dideoxyadenosine, 2′,3′-dideoxyuridine, 2′,3′-dideoxycytosine, 2′,3′-dideoxyguanosine, 2′,3′-dideoxythymine, a 2′-deoxynucleoside, and —O— methylnucleoside.

20. The synthetic isolated terminally optimized mRNA of claim 1, wherein the 3′ tailing region comprises a stem loop sequence.

21.-56. (canceled)
